(19) United States
(12) Patent Application Publication
(10) Pub. No.: US 2012/0266324 A1
(43) Pub. Date: Oct. 18, 2012

(54) Self-Reproducing Hybrid Plants

(75) Inventor: SHAI J. LAWIT, URBANDALE, IA (US)

(73) Assignee: PIONEER HI BRED INTERNATIONAL INC., JOHNSTON, IA (US)

(21) Appl. No.: 13/445,419

(22) Filed: Apr. 12, 2012

Related U.S. Application Data
(60) Provisional application No. 61/475,947, filed on Apr. 15, 2011.

(51) Int. Cl. A01H 1/02; C12N 15/63; C07H 21/04; A01H 5/00; A01H 5/10

(52) U.S. Cl. 800/275; 800/260; 800/298; 536/24.5; 800/306; 800/322; 800/314; 800/317.3; 800/312; 800/320.1; 800/320.3; 800/320; 800/320.2; 435/320.1

(57) ABSTRACT

Compositions and methods for the production of self-reproducing hybrid plants are provided. Compositions include suppression cassettes encoding polynucleotides and promoters that result in the MiMe diploid gamete phenotype compositions and suppression cassettes and expression cassettes useful for genome elimination of a parental diploid gamete in a fertilized zygote. The methods involve crossing a first plant comprising a first suppression cassette responsible for producing the MiMe diploid gamete phenotype and a first expression cassette expressing an active CENH3 mutant with a second plant comprising a second suppression cassette that reduces the level of wild-type CENH3 and a second expression cassette comprising a polynucleotide expressing CENH3 specifically in the ovule. Self fertilization of the resultant progeny plant results in the elimination of the female diploid genome in the zygote and normal development of the endosperm. Additionally provided are plants and seeds produced by the methods of the invention.

### CROSS-REFERENCE TO RELATED APPLICATIONS

[0001] This is a utility application which claims priority of Provisional Application Ser. No. 61/475,947 filed Apr. 14, 2011, hereby incorporated by reference in its entirety.

### FIELD

[0002] The invention relates to the field of genetic manipulation of plants, particularly the production of self-reproducing hybrid plants.

### BACKGROUND

[0003] Although plant breeding programs worldwide have made considerable progress developing new cultivars with improved disease resistances, yields and other useful traits, breeding as a whole relies on screening numerous plants to identify novel, desirable characteristics. Very large numbers of progeny from crosses often must be grown and evaluated over several years in order to select one or a few plants with a desired combination of traits.

[0004] A continuing goal of plant breeders is to develop stable, high-yielding varieties that are agronomically sound. Standard breeding of diploid plants often requires screening and back-crossing of a large number of plants to achieve the desired genotype. One solution to the problem of screening large numbers of progeny has been to generate doubled haploid plants that eliminate genomic heterogeneity and, thus, any segregation of traits. When economically and biologically feasible, additional gains are often made through employing heterosis with hybrids of two inbred parents.

[0005] Heterosis studies in soybean estimate that there is approximately a 10% yield improvement potential with hybrids. However, hybrid soybeans have never been developed because pollen flow from male to female inbreds is very poor. Pollen vectoring is a problem that has few, if any, solutions available for high volume hybrid production in soybean. However, hand crosses could produce limited hybrid numbers and volume production of hybrid soybean could commence with the aid of self-reproduction.

[0006] Furthermore, current transgene introgression requires the maintenance of transgene homozygosity in inbred lines and varieties, which greatly limits the potential for native and transgene trait stacking. However, by using hybrid plants, transgenes could be stacked much more easily by providing a single copy from each parent. Availability of a system to generate self-reproducing hybrids would find value in both plant breeding and development.

[0007] Thus, marked improvements in the economics of breeding can be achieved via self-reproducing hybrid production, since selection and other procedural efficiencies can be substantially improved. Current methods for parent-specific genome elimination result in plants with near total male sterility and very low rates of female fecundity, making propagation of the hybrid plant difficult.

### BRIEF SUMMARY

[0008] Compositions and methods for the production of self-reproducing hybrid plants are provided. Compositions include suppression cassettes encoding polynucleotides and promoters that result in the MiMe diploid gamete phenotype. Further provided are methods and compositions comprising suppression cassettes and expression cassettes resulting in genome elimination of a parental diploid gamete in the fertilized zygote, producing a self-reproducing hybrid plant.

[0009] Methods for producing a self-reproducing hybrid plant include crossing a first plant comprising a first suppression cassette responsible for producing the MiMe diploid gamete phenotype and a first expression cassette expressing an active CENH3 mutant with a second plant comprising a second suppression cassette that reduces the level of wild-type CENH3 and a second expression cassette comprising a polynucleotide expressing CENH3 specifically in the ovule. Self fertilization of the resultant progeny plant results in the elimination of the female diploid genome in the zygote and normal development of the endosperm. Additionally provided are plants and seeds, particularly hybrid plants and hybrid seeds, produced by the methods of the invention.

### BRIEF DESCRIPTION OF THE DRAWINGS

[0010] This patent or application file contains at least one drawing figure executed in color. Copies of this patent or patent application publication with color drawing(s) will be provided by the Office upon request and payment of the necessary fee.

[0011] FIG. 1 shows the transgene system designed to activate clonal reproduction in hybrids, but maintain normal sexual reproduction in the parental inbred varieties.

[0012] FIG. 2 shows an example of the transgene system designed to activate clonal reproduction in hybrids, but maintain normal sexual reproduction in the parental inbred varieties. T7 polymerase and Gal4DBD-VP16 (or LexA) two component activation systems are shows as examples of possible transactivators that would activate the self reproduction system only once brought together in a hybrid cross containing the two transgene cassettes where the amiRNA silencing elements would be activated.

[0013] FIG. 3 shows the mechanisms utilized to result in self-reproducing hybrid plants.

[0014] FIG. 4 shows (Left) quadruply labeled embryo sac in an ovule from Arabidopsis transgenic PHP47078 at the egg cell stage of development. These labeled embryo sac cells allow cell development and viability to be monitored. (Right) Triply labeled embryo sac in an ovule from Arabidopsis transgenic PHP42551. This embryo sac is at the early embryo stage of development prior to the globular stage. Numerous endosperm nuclei are visible in cyan demonstrating the ability to follow early endosperm development.

[0015] FIG. 5. PHP51198 T1 microspores (5A) and T2 root cell squashes (5B) demonstrating MiMe phenotypes. The MiMe phenotypes displayed are dyad microspore development instead of quartet, and tetraploidy in the T2 generation instead of diploidy.

[0016] FIG. 6. Alternate Strategy for 4593—Self Reproducing Hybrid Carrying Cassettes and 2.

[0017] In 6A, T7 polymerase (for example) drives constitutive suppression of Meiosis genes leading to unreduced gametophytes. Then, Gal4DBD-VP16 (for example) drives suppression of CENH3 in the meiocytes, setting the stage for the CENH3 GFP-tailswap expression. Following that, an egg cell promoter drives expression of the CENH3 GFP-tailswap in the egg cell leading to female genome elimination in the first zygotic mitosis.

[0018] In 6B, AT-DD65 PRO and a Pollen PRO drives the WT CENH3 in the central cell and pollen allowing normal mitosis in the endosperm, and preventing genome elimination in the endosperm.

[0019] FIG. 7. Example of a mitotic spread of a php51198 T2 Arabidopsis seedling which does not display the MiMe phenotype. Two nuclei at early metaphase, each showing the diploid number of chromosomes (2n=10 chromosomes). Chomosomes are DAPI-Stained.

[0020] FIG. 8. Examples of mitotic spreads of MiMe T2 Arabidopsis seedlings showing the tetraploid number of chromosomes (4N=20) at various phases. Chomosomes are DAPI-Stained. 8A—Late anaphase, 8B—Early telophase, and 8C—telophase.

### DETAILED DESCRIPTION

[0021] The present inventions now will be described more fully hereinafter with reference to the accompanying drawings, in which some, but not all embodiments of the inventions are shown. Indeed, these inventions may be embodied in many different forms and should not be construed as limited to the embodiments set forth herein; rather, these embodiments are provided so that this disclosure will satisfy applicable legal requirements. Like numbers refer to like elements throughout.

[0022] Many modifications and other embodiments of the inventions set forth herein will come to mind to one skilled in the art to which these inventions pertain having the benefit of the teachings presented in the foregoing descriptions and the associated drawings. Therefore, it is to be understood that the inventions are not to be limited to the specific embodiments disclosed and that modifications and other embodiments are intended to be included within the scope of the appended claims. Although specific terms are employed herein, they are used in a generic and descriptive sense only and not for purposes of limitation.

### I. Apomixis

[0023] Apomixis, or asexual reproduction through seed, results in progeny that are genetic clones of the maternal parent. Apomixis requires a non-reduction of the chromosomes from one parental gamete and subsequent parthenogenic development of the embryo. Apomixis may provide a mechanism to maintain heterosis, or hybrid vigor, in crop plants. The present invention involves a combination of two technologies used to produce a self-reproducing hybrid. The first technology is a methodology to produce non-reduction of the genomic content of gametes or mitosis instead of meiosis (MiMe), as demonstrated in Arabidopsis (d′Erfurth, et al., (2009). PLoS Biol 7:e1000124). The second technology has the capacity to induce parent-specific genome elimination at high frequency (CENH3 GFP-tailswap) (Ravi and Chan, (2010) Nature 464:615-618). As used herein, “self-reproducing hybrid” refers to hybrid plants capable of perpetuating a heterozygous genome in progeny following self-fertilization. A demonstration of the capacity for these components to produce self-reproducing plants was shown by Marimuthu, et al., (2011) Science 331:876. However, the efficiency of this system is poor and requires significant modifications to become economically and biologically efficient. Specifically, the system demonstrated by Marimuthu, et al. (2011) does not provide for a self-perpetuating clonal line through a single plant line. It rather relies on a crossing of two distinct lines with each generation to perpetuate the clones, which would significantly limit the advantages of a stable hybrid production system. As disclosed here it is hypothesized that the demonstrated system by Marimuthu does not provide for consistent and reliable production of endosperm. Additionally, the genome elimination technology may disrupt some meiotic events, a potential cause of the aneuploidy observed in the system (Ravi, et al., (2011). Meiosis-Specific Loading of the Centromere-Specific Histone CENH3 in Arabidopsis thaliana. PLoS Genet. 7, e1002121. Epub 1002011 Jun3 1002129.). The methods described herein provide a means to overcome these limitations.

[0024] A. Mitosis Instead of Meiosis

[0025] Meiosis is a cell-division mechanism essential for sexually reproducing organisms. In plants, meiosis begins with one diploid cell containing two copies of each chromosome (2n) and produces four haploid gamete cells containing a single copy of each chromosome (1n). Traditional meiosis produces haploid gametes, each having a unique combination of maternal and paternal DNA. Meiosis typically involves chromosomal replication followed by recombination and two rounds of segregation and division. Alternatively, mitosis produces two identical daughter cells following a round of chromosomal replication, segregation, and division.

[0026] Inactivation of specific genes controlling meiosis can alter the chromosomal composition of the resultant gametes. For example, a mutation in the dyad gene of Arabidopsis resulted in female meiosis and megasporogenesis producing a dyad of megaspores, rather than a tetrad (Siddiqi, et al., (2000) Arabidopsis Development 127:197-207). By selectively inactivating a combination of meiosis-related genes, the second meiotic division can be replaced by a mitotic-like division, resulting in unreduced gametes that are identical to the parent cell (d′Erfurth, et al., (2009) PLoS Biol 7(6):e1000124). Inactivating osd1 resulted in an Arabidopsis mutant that did not undergo meiosis II, giving rise to diploid gametes having recombined chromosomes. Further, a double spo11-1/rec8 Arabidopsis mutant avoids the first division of meiosis and, instead, undergoes a mitotic-like division, followed by an unbalanced second division resulting in chromosomally unbalanced and sterile gametes. A triple osd1/spo11-1/rec8 mutant, designated MiMe, led to a mitotic-like first division due to the Atspo11-1 and Atrec8 mutations, and an absent second meiotic division due to the osd1 mutation. Thus, the MiMe mutation resulted in the replacement of meiosis with a mitotic-like division, thereby producing gametes having genetically identical chromosomes as the parent.

[0027] Various compositions are provided comprising suppression cassettes encoding inhibitory polynucleotides that decrease the activity of target polypeptides. In particular embodiments, silencing elements are provided encoding inhibitory polynucleotides that decrease the activity of Spo11-1, Rec8 or Osd1. In specific embodiments, silencing elements encoding inhibitory polynucleotides are provided that decrease the activity of Spo11-1, Rec8 and Osd1, thereby producing the MiMe phenotype. Such nucleic acid molecule constructs are referred to herein as “MiMe silencing elements”.

[0028] The Spo11 family of plant proteins are homologs of archaeal DNA topoisomerase VIA subunit (topo VIA), which participates in DNA replication. Spo11-1 specifically contributes to the creation of double stranded breaks necessary for recombination in the early phases of meiosis, and inactivating Spo11-1 results in sterile plants. Rec8 is responsible for localization of the axial chromosomal elements during meiosis. Following meiosis I, Rec8 has been identified at the centromere, and the depletion of Rec8 eliminated centromeric cohesion. Thus, the presence of Rec8 at the centromere has been thought to maintain sister chromatid cohesion throughout meiosis I (see, Nat Cell Biol 1:E125-7 (1999)). Osd1 (omission of second division) is an UVI4-like protein identified as a result of its co-regulation with other meiotic genes. In osd1 deficient Arabidopsis plants, the products of male meiosis were dyads instead of tetrads. Further, only tetrapoloid (4n) and triploid (3n) progeny were detected from self-pollinated osd1 deficient mutants. Thus, inactivation of osd1 produced functional diploid gametes due to absence of the second meiotic division.

[0029] In particular embodiments of the present invention, suppression cassettes provided elsewhere herein comprise MiMe silencing elements operably linked to promoters that drive expression in a plant. In some embodiments, promoters operably linked to MiMe silencing elements are inducible promoters. For example, in specific embodiments, MiMe silencing elements are operably linked to inducible promoters activated by a transactivator. As discussed elsewhere herein, the transactivator can be provided in the same plant or in a separate plant subsequently crossed with a plant comprising a MiMe silencing element operably linked to a transactivator-inducible promoter, thereby producing functional diploid gametes.

[0030] B. Genome Elimination

[0031] A method for producing plants that only inherit chromosomes from one parent can significantly accelerate plant breeding by providing plants in a single generation without the need for generations of inbreeding. By altering the structure of proteins of the kinetochore complex (centromere-specific polypeptides), such as CENH3, the chromosomes of the altered parent are eliminated in the zygote, thereby creating haploid plants. The resultant haploid plants have very high male sterility, but when pollinated by wild-type males, the female genome is eliminated at the first zygotic mitosis. In addition to near total male sterility, the resultant plants also show very low rates of female fecundity, likely due to female genome elimination in the endosperm. Egg cell-specific promoters can be useful in improving female fecundity associated with female genome elimination of the fertilized zygote by driving active CENH3 mutant expression in the egg cell. Egg cell-specific expression can maintain the female genome in the endosperm, thus ensuring the proper ratio of maternal to paternal chromosomes necessary for proper endosperm development. In some embodiments, active CENH3 mutant expression can be more widely expressed through the ovule, but a central cell promoter could be used to express a wild-type CENH3 thus “rescuing” the maternal genome in the resulting endosperm.

[0032] Various compositions that employ wild-type and modified kinetochore (centromere-specific) proteins are provided. Methods and compositions are provided comprising, for example, the CENH3, CENPC, MCM21, MIS12, NDC80 or NUF2 centromere-specific proteins. CENH3 proteins are discussed below. Structural and/or functional features of the other kinetochore proteins have been described in, for example, Du, et al., (2010) PLoS Genet. 6:e1000835; Talbert, et al., (2004) J. Biol. 3:18; Sato, et al., (2005) Chrom. Res. 13:827-834; Pidoux, et al., (2000) Opin. Cell Biol. 12:308-319; Du, et al., (2007) Chrom. Res. 15:767-775; Zhang and Dawe, (2011) Chrom. Res. (Mar. 19, 2011 epub) 1-10 and Meraldi, et al., (2006) Genome Biol. 7:R23, all of which are herein incorporated by reference.

[0033] In particular, various compositions that employ CENH3 and modified variants thereof are provided. CENH3 proteins are a well-characterized class of H3 histone protein variants associated with centromere function and development as one of the proteins that form the kinetochore complex. CENH3 proteins are characterized by a variable tail domain, which does not form a rigid secondary structure, and a conserved histone fold domain made up of three a-helical regions connected by loop sections. Additional structural and functional features of CENH3 proteins can be found in, e.g., Cooper, et al., (2004) Mol Biol Evol. 21(9):1712-8; Malik, et al., (2003) Nat Struct Biol. 10(11):882-91; Black, et al., (2008) Curr Opin Cell Biol. 20(1):91-100.

[0034] The CENH3 histone fold domain is conserved between CENH3 proteins from different species and can be distinguished by three a-helical regions connected by loop sections. While it will be appreciated that the exact location of the histone fold domain will vary in CENH3 variants, it will be found at the carboxyl terminus of an endogenous (wild-type) CENH3 protein. The border between the tail domain and the histone fold domain of CENH3 proteins is at, within, or near (i.e., within 5, 10, 15, 20 or 25 amino acids from the “P” of) the conserved PGTVAL (SEQ ID NO: 1) sequence. The PGTVAL sequence is approximately 81 amino acids from the N terminus of the Arabidopsis CENH3 protein, though the distance from the N terminus of different endogenous CENH3 proteins varies. Thus, in some embodiments, the histone fold region of CENH3 employed in the tailswap proteins includes all of the C-terminal amino acids of an endogenous CENH3 protein (or a protein substantially similar to the endogenous sequence) up to and including the PGTVAL. In other embodiments, the tailswap proteins can comprise more or less of the CENH3 sequence. For example, in some embodiments, the tailswap will comprise the C-terminal sequence of a CENH3 protein, but only up to an amino acid 5, 10, 15, 20 or 25 amino acids in the C-terminal direction from the “P” of the conserved PGTVAL sequence. In some embodiments, the tailswap will comprise the C-terminal sequence of a CENH3 protein, but only up to 5, 10, 15, 20 or 25 amino acids in the N-terminal direction from the “P” of the conserved PGTVAL sequence.

[0035] Any number of mutations of CENH3 can be introduced into a CENH3 protein to generate a mutated (including but not limited to a recombinantly altered) CENH3 protein capable of generating haploid plants when expressed in a plant having suppressed expression of an endogenous CENH3 protein and wherein wild-type CENH3 protein is provided to the resulting transgenic plant. For example, wild-type CENH3 can be provided by crossing a transgenic plant expressing an active CENH3 mutant to a plant expressing a wild-type CENH3 protein. Active CENH3 mutant proteins can be identified, for example, by random mutagenesis, by single or multiple amino acid targeted mutagenesis, by generation of complete or partial protein domain deletions, by fusion with heterologous amino acid sequences, or by combinations thereof. “Active centromere-specific mutant polypeptides refer to polypeptides that, when expressed in a plant in which the wild-type centromere-specific polypeptide is knocked out or inactivated, result in viable plants, which viable plants when crossed to a wild-type plant, produce haploid progeny at a more than normal frequency (e.g., at least 0.1, 0.5, 1, 5, 10, 20% or more). For example, “active CENH3 mutant proteins” refer to proteins that, when expressed in a plant in which CENH3 is knocked out or inactivated, result in viable plants, which viable plants when crossed to a wild-type plant, produce haploid progeny at a more than normal frequency (e.g., at least 0.1, 0.5, 1, 5, 10, 20% or more). Active mutated CENH3 proteins can be readily tested by recombinant expression of the mutated CENH3 protein in a plant lacking endogenous CENH3 protein, crossing the transgenic plant (as a male or female, depending on fertility) to a plant expressing wild-type CENH3 protein and then screening for the production of haploid progeny.

[0036] In some embodiments, an active CENH3 mutant protein is identical to an endogenous CENH3 protein but for 1, 2, 3, 4, 5, 6, 7, 8 or more (e.g., 1-2, 1-4, 1-8) amino acids. For example, in some embodiments, the endogenous wild-type protein from the plant is identical or substantially identical to SEQ ID NO: 5 and the active CENH3 mutant protein differs from the endogenous CENH3 protein by 1, 2, 3, 4, 5, 6, 7, 8 or more (e.g., 1-2, 1-4, 1-8) amino acids. It is believed that active CENH3 mutants include, for example, proteins comprising: a heterologous amino acid sequence (including but not limited to green fluorescent protein (GFP)) linked to a CENH3 truncated or complete tail domain or non-CENH3 tail domain, either of which is linked to a CENH3 histone fold domain or a CENH3 truncated tail domain, the heterologous CENH3 tail domain or non-CENH3 tail domain, either of which is linked to a CENH3 histone fold domain. In some embodiments, the active CENH3 mutant protein comprises a fusion of an amino-terminal heterologous amino acid sequence to the histone-fold domain of a CENH3 protein. Generally, the histone fold domain will be identical or at least substantially identical to the CENH3 protein endogenous to the organism in which the active CENH3 mutant protein will be expressed. In some embodiments, the active CENH3 mutant protein will include a histone tail domain, which can be, for example, a non-CENH3 tail domain, or a CENH3 tail domain.

[0037] It is believed that a large number of different amino acid sequences, when linked to a protein comprising a CENH3 histone-fold domain and a sequence that can function as or replace a histone tail domain, can be used to construct an active CENH3 mutant. In some embodiments, a heterologous sequence is linked directly to the CENH3 histone-fold domain.

[0038] In some embodiments, the heterologous sequence is an intervening amino acid sequence linked to the CENH3 histone-fold domain. In some embodiments, the intervening amino acid sequence is an intact or truncated CENH3 tail domain. The heterologous amino acid sequence, in combination with the histone-fold domain, will be sufficient to prevent the lethality associated with loss of endogenous CENH3, but will sufficiently disrupt centromeres to allow for production of haploid progeny, as discussed herein. Thus, in some embodiments, the heterologous amino acid sequence will comprise a portion that is, or mimics the function of, a histone tail domain and optionally can also comprise a bulky amino acid sequence that disrupts centromere function. In certain embodiments, at least a portion of the heterologous amino acid sequence of the mutated CENH3 protein comprises any amino acid sequence of at least 10, 20, 30, 40, 50, e.g., 10-30, 10-50, 20-50, 30-50 amino acids, optionally lacking a stable secondary structure (e.g., lacking coils, helices or beta-sheets). In some embodiments, the tail domain has less than 90, 80 or 70% identity with the tail domain (e.g., the N-terminal 135 amino acids) of the CENH3 protein endogenous to the organism in which the mutated CENH3 protein will be expressed. In some embodiments, the tail domain of the mutated CENH3 protein comprises the tail domain of a non-CENH3 histone protein, including but not limited to an H3 histone protein. In some embodiments, the tail domain of the mutated CENH3 protein comprises the tail domain of a non-CENH3 histone protein endogenous to the organism in which the mutated CENH3 protein will be expressed. In some embodiments, the tail domain of the mutated CENH3 protein comprises the tail domain of a homologous or orthologous (from a different plant species) CENH3 tail. For example, it has been found that GFP fused to a maize CENH3 tail domain linked to an Arabidopsis CENH3 histone-fold domain is active.

[0039] As noted above, in some embodiments, the tail domain of an H3 histone (not to be confused with a CENH3 histone) is used as the tail domain portion of the active CENH3 mutant protein (these embodiments are sometimes referred to as “tailswap” proteins). Plant H3 tail domains are well conserved in various organisms.

[0040] In some embodiments, active CENH3 mutant proteins will lack at least a portion (e.g., at least 5, 10, 15, 20, 25, 30 or more amino acids) of the endogenous CENH3 N-terminal region, and thus, in some embodiments, will have a truncated CENH3 tail domain compared to a wild-type endogenous CENH3 protein. Active CENH3 mutant proteins may, or may not, be linked to a heterologous sequence.

[0041] Optionally, the heterologous amino acid sequence can comprise, or further comprise, one or more amino acid sequences at the amino and/or carboxyl terminus and/or linking the tail and histone fold domains. For example, in some embodiments, the active CENH3 mutant protein (e.g., a tailswap or other active CENH3 mutant protein) comprises a heterologous amino acid sequence linked to the amino end of the tail domain. In some embodiments, the heterologous sequence is linked to the amino terminus of an otherwise wild-type CENH3 protein, wherein the heterologous sequence interferes with centromere function. For example, it has been found that GFP, when linked to wild-type CENH3, sufficiently disrupts centromeres to allow for production of haploid progeny. It is believed that the heterologous sequence can be any sequence that disrupts the CENH3 protein's ability to maintain centromere function. Thus, in some embodiments, the heterologous sequence comprises an amino acid sequence of at least 5, 10, 15, 20, 25, 30, 50 or more kD.

[0042] In some embodiments, the active CENH3 mutant protein will comprise a protein domain that acts as a detectable or selectable marker. For example, an exemplary selectable marker protein is fluorescent or an antibiotic or herbicide resistance gene product. Selectable or detectable protein domains are useful for monitoring the presence or absence of the mutated CENH3 protein in an organism.

[0043] In other embodiments, expression cassettes are provided comprising an active CENH3 mutant protein operably linked to a promoter that drives expression in a plant. In particular embodiments, promoters operably linked to active CENH3 mutant proteins are inducible promoters or tissue-specific promoters. For example, in specific embodiments, active CENH3 mutant proteins are operably linked to promoters specifically induced in the ovule of a plant.

[0044] In some embodiments, expression cassettes comprising a nucleotide sequence encoding wild-type CENH3 operably linked to a promoter that drives expression in a plant are provided. In particular embodiments, promoters operably linked to nucleotide sequences encoding wild-type CENH3 are tissue specific promoters. For example, nucleotide sequences encoding wild-type CENH3 operably linked to central cell-specific promoters (e.g., AT-DD65 promoter) that drive expression of wild-type CENH3 in the central cell of a plant are provided. Expression cassettes comprising a central-cell specific promoter operably linked to a polynucleotide encoding wild-type CENH3 can be provided in the same parental plant as CENH3 suppression cassettes and/or the same parental plant as active CENH3 mutant expression cassettes.

[0045] Further provided are inhibitory polynucleotides that decrease the activity of wild-type CENH3. In some embodiments, suppression cassettes comprising a silencing element encoding inhibitory polynucleotides that decrease the activity of wild-type CENH3 operably linked to an inducible promoter that drives expression in a plant are provided. In specific embodiments, suppression cassettes comprising a silencing element encoding inhibitory polynucleotides that decrease the activity of wild-type CENH3 operably linked to a promoter specifically induced by a transactivator are provided. As discussed elsewhere herein, the transactivator can be provided in the same plant or in a separate plant subsequently crossed with a plant comprising a CENH3 silencing element operably linked to a transactivator-inducible promoter, thereby activating the CENH3 silencing element in the progeny plant. In some embodiments, a recombinase may be used to eliminate a buffering component between a promoter and the DNA region encoding the inhibitory polynucleotides.

[0046] In a particular embodiment, a first plant comprising a CENH3 expression cassette comprising a central cell-specific promoter, a CENH3 suppression cassette comprising a transactivator A-inducible promoter and a transactivator B expression cassette comprising an ovule-specific promoter is crossed with a second plant comprising an active CENH3 mutant expression cassette comprising an ovule-specific promoter, a MiMe suppression cassette comprising a transactivator B-inducible promoter and a transactivator A expression cassette comprising an ovule-specific promoter, producing a tetraploid zygote that subsequently loses the female genome from the egg cell following a generation of self fertilization, ultimately resulting in a self-reproducing hybrid progeny plant.

[0047] C. Methods for Producing Self-Reproducing Hybrid Plants

[0048] A single-cross hybrid plant results from the cross of two inbred varieties, each of which has a genotype that complements the genotype of the other. A hybrid progeny of the first generation is designated F1. In the development of commercial hybrids in a plant breeding program, the F1 hybrid plants are most desired. F1 hybrids are more vigorous than their inbred parents. This hybrid vigor, or heterosis, can be manifested in many polygenic traits, including increased vegetative growth and increased yield.

[0049] Crossing a pollen parent plant comprising cassettes for suppressing the activity of an endogenous kinetochore complex protein (e.g., CENH3, CENPC, MCM21, MIS12, NDC80 or NUF2 protein) in progeny ovules and cassettes for expressing an endogenous kinetochore complex protein in the central cell of progeny to an ovule parent plant comprising cassettes for expressing inhibitory polynucleotides resulting in a MiMe phenotype in progeny and cassettes for expressing an active mutated kinetochore complex protein (e.g., a tailswap or other mutated CENH3 or non-CENH3 kinetochore complex protein) in the ovule of progeny as described herein, will result in at least some progeny (e.g., at least 0.1%, 0.5%, 1%, 5%, 10%, 20% or more) that are diploid following self-fertilization and comprise only chromosomes from the male parent that expresses the kinetochore complex protein. Thus, the present invention allows for the generation of diploid plants capable of self-reproducing.

[0050] While the present invention is not known to depend on a particular mechanism, it is believed that the methods of the present invention increase self-reproducing hybrid seed viability by preventing female genome elimination in the central cell of the ovule. It is further believed that complementing the central cell with wild-type CENH3 allows proper endosperm development by maintaining a 2M:1P (2 maternal:1 paternal) ratio necessary for proper endosperm development.

[0051] In some embodiments, a method for producing a self-reproducing hybrid plant is provided comprising crossing a first plant comprising a first suppression cassette comprising a MiMe silencing element and a first expression cassette expressing an active CENH3 mutant protein with a second plant comprising a second suppression cassette that reduces the level of wild-type CENH3 and a second expression cassette expressing CENH3 specifically in the central cell. Self fertilization of the resultant progeny plant results in the elimination of the female diploid genome in the zygote and normal development of the endosperm, thereby producing a self-reproducing hybrid plant.

### II. Compositions

[0052] Compositions disclosed herein provide nucleic acid molecule constructs comprising expression and suppression cassettes comprising polynucleotides related to meiosis or genome elimination. As used herein, “meiosis-related” or “MiMe-related” refers to those polynucleotides encoding polypeptides involved directly or indirectly in the process of meiosis. Further, as used herein, “kinetochore” or “CENH3” refers to the specialized protein structure on chromosomes that mediates the attachment of spindle fibers during cell division.

[0053] Decreasing the level of polynucleotides encoding such polypeptides or decreasing the activity of the encoded polypeptides could result in absence of the first meiotic division, meiosis II, or unbalanced second meiotic divisions. Methods for measuring the level of polynucleotides and activity of the encoded polypeptides are disclosed elsewhere herein. For example, RNA transcripts are monitored through the use of qRT-PCR. SybrGreen or TaqMan probes may be used. Polypeptide activities are assayed indirectly through cytogenetics and progeny segregation analysis.

[0054] By “reduces”, “reducing”, “decrease” or “decreasing” the expression level of a polynucleotide or activity of a polypeptide encoded thereby is intended to mean, the polynucleotide or polypeptide level of the target sequence is statistically lower than the polynucleotide level or polypeptide level of the same target sequence in an appropriate control plant that is not expressing the silencing element. In particular embodiments of the invention, reducing the polynucleotide level and/or the polypeptide level of the target sequence in a plant according to the invention results in less than 95%, less than 90%, less than 80%, less than 70%, less than 60%, less than 50%, less than 40%, less than 30%, less than 20%, less than 10%, or less than 5% of the polynucleotide level, or the level of the polypeptide encoded thereby, of the same target sequence in an appropriate control plant. Methods to assay for the level of the RNA transcript, the level of the encoded polypeptide or the activity of the polynucleotide or polypeptide are known in the art and discussed elsewhere herein.

TABLE 1

| | | | POLYNUCLEOTIDE/ |
|---|---|---|---|
| | | | POLYPEPTIDE |
| SEQ ID. | ORGANISM NAME | DESCRIPTION | (PN/PP) |
| SEQ ID NO: 1 | ARTIFICIAL SEQUENCE | CONSERVED | PP |
| | | DOMAIN | |
| SEQ ID NO: 2 | ARABIDOPSIS THALIANA | SPO11-1 | PN |
| SEQ ID NO: 3 | ARABIDOPSIS THALIANA | 3ISD | PN |
| SEQ ID NO: 4 | ARABIDOPSIS THALIANA | REC8 | PN |
| SEQ ID NO: 5 | ARABIDOPSIS THALIANA | CENH3 | PN |
| SEQ ID NO: 6 | ARTIFICIAL SEQUENCE | PRIMER | PN |
| SEQ ID NO: 7 | ARTIFICIAL SEQUENCE | PRIMER | PN |
| SEQ ID NO: 8 | ARTIFICIAL SEQUENCE | PRIMER | PN |
| SEQ ID NO: 9 | ARTIFICIAL SEQUENCE | PRIMER | PN |
| SEQ ID NO: 10 | ARTIFICIAL SEQUENCE | PRIMER | PN |
| SEQ ID NO: 11 | ARTIFICIAL SEQUENCE | PRIMER | PN |
| SEQ ID NO: 12 | ARTIFICIAL SEQUENCE | PRIMER | PN |
| SEQ ID NO: 13 | BRASSICA NAPUS | CENH3 | PN |
| SEQ ID NO: 14 | BRASSICA RAPA | CENH3 | PN |
| SEQ ID NO: 15 | BRASSICA RAPA | CENH3 | PP |
| SEQ ID NO: 16 | GLYCINE MAX | CENH3 | PN |
| SEQ ID NO: 17 | GLYCINE MAX | CENH3 | PN |
| SEQ ID NO: 18 | MEDICAGO TRUNCATULA | CENH3 | PN |
| SEQ ID NO: 19 | MEDICAGO TRUNCATULA | CENH3 | PP |
| SEQ ID NO: 20 | ORYZA SATIVA | CENH3 | PN |
| SEQ ID NO: 21 | ORYZA SATIVA | CENH3 | PP |
| SEQ ID NO: 22 | ORYZA SATIVA | CENH3 | PN |
| SEQ ID NO: 23 | ORYZA SATIVA | CENH3 | PP |
| SEQ ID NO: 24 | SETARIA ITALICA | CENH3 | PN |
| SEQ ID NO: 25 | SETARIA ITALICA | CENH3 | PP |
| SEQ ID NO: 26 | SORGHUM BICOLOR | CENH3 | PN |
| SEQ ID NO: 27 | SORGHUM BICOLOR | CENH3 | PP |
| SEQ ID NO: 28 | VITIS VINIFERA | CENH3 | PN |
| SEQ ID NO: 29 | VITIS VINIFERA | CENH3 | PP |
| SEQ ID NO: 30 | ZEA MAYS | CENH3 | PN |
| SEQ ID NO: 31 | ZEA MAYS | CENH3 | PP |
| SEQ ID NO: 32 | BRASSICA NAPUS | OSD1 | PN |
| SEQ ID NO: 33 | BRASSICA RAPA | OSD1 | PN |
| SEQ ID NO: 34 | BRASSICA RAPA | OSD1 | PP |
| SEQ ID NO: 35 | BRASSICA RAPA | OSD1 | PN |
| SEQ ID NO: 36 | BRASSICA RAPA | OSD1 | PP |
| SEQ ID NO: 37 | GLYCINE MAX | OSD1 | PN |
| SEQ ID NO: 38 | GLYCINE MAX | OSD1 | PP |
| SEQ ID NO: 39 | GLYCINE MAX | OSD1 | PN |
| SEQ ID NO: 40 | GLYCINE MAX | OSD1 | PP |
| SEQ ID NO: 41 | MEDICAGO TRUNCATULA | OSD1 | PN |
| SEQ ID NO: 42 | MEDICAGO TRUNCATULA | OSD1 | PP |
| SEQ ID NO: 43 | ORYZA SATIVA | OSD1 | PN |
| SEQ ID NO: 44 | ORYZA SATIVA | OSD1 | PP |
| SEQ ID NO: 45 | ORYZA SATIVA | OSD1 | PN |
| SEQ ID NO: 46 | ORYZA SATIVA | OSD1 | PP |
| SEQ ID NO: 47 | SORGHUM BICOLOR | OSD1 | PN |
| SEQ ID NO: 48 | SORGHUM BICOLOR | OSD1 | PP |
| SEQ ID NO: 49 | VITIS VINIFERA | OSD1 | PN |
| SEQ ID NO: 50 | VITIS VINIFERA | OSD1 | PP |
| SEQ ID NO: 51 | ZEA MAYS | OSD1 | PN |
| SEQ ID NO: 52 | ZEA MAYS | OSD1 | PP |
| SEQ ID NO: 53 | BRASSICA NAPUS | SPO11-1 | PN |
| SEQ ID NO: 54 | BRASSICA NAPUS | SPO11-1 | PP |
| SEQ ID NO: 55 | BRASSICA RAPA | SPO11-1 | PN |
| SEQ ID NO: 56 | BRASSICA RAPA | SPO11-1 | PP |
| SEQ ID NO: 57 | GLYCINE MAX | SPO11-1 | PN |
| SEQ ID NO: 58 | GLYCINE MAX | SPO11-1 | PP |
| SEQ ID NO: 59 | GLYCINE MAX | SPO11-1 | PN |
| SEQ ID NO: 60 | GLYCINE MAX | SPO11-1 | PP |
| SEQ ID NO: 61 | GLYCINE MAX | SPO11-1 | PN |
| SEQ ID NO: 62 | GLYCINE MAX | SPO11-1 | PP |
| SEQ ID NO: 63 | MEDICAGO TRUNCATULA | SPO11-1 | PN |
| SEQ ID NO: 64 | MEDICAGO TRUNCATULA | SPO11-1 | PP |
| SEQ ID NO: 65 | ORYZA SATIVA | SPO11-1 | PN |
| SEQ ID NO: 66 | ORYZA SATIVA | SPO11-1 | PP |
| SEQ ID NO: 67 | SETARIA ITALICA | SPO11-1 | PN |
| SEQ ID NO: 68 | SETARIA ITALICA | SPO11-1 | PP |
| SEQ ID NO: 69 | SORGHUM BICOLOR | SPO11-1 | PN |
| SEQ ID NO: 70 | SORGHUM BICOLOR | SPO11-1 | PP |
| SEQ ID NO: 71 | VITIS VINIFERA | SPO11-1 | PN |
| SEQ ID NO: 72 | VITIS VINIFERA | SPO11-1 | PP |
| SEQ ID NO: 73 | ZEA MAYS | SPO11-1 | PN |
| SEQ ID NO: 74 | ZEA MAYS | SPO11-1 | PP |
| SEQ ID NO: 75 | BRASSICA NAPUS | REC8 | PN |
| SEQ ID NO: 76 | BRASSICA RAPA | REC8 | PN |
| SEQ ID NO: 77 | BRASSICA RAPA | REC8 | PP |
| SEQ ID NO: 78 | GLYCINE MAX | REC8 | PN |
| SEQ ID NO: 79 | GLYCINE MAX | REC8 | PP |
| SEQ ID NO: 80 | GLYCINE MAX | REC8 | PN |
| SEQ ID NO: 81 | GLYCINE MAX | REC8 | PP |
| SEQ ID NO: 82 | MEDICAGO TRUNCATULA | REC8 | PN |
| SEQ ID NO: 83 | MEDICAGO TRUNCATULA | REC8 | PP |
| SEQ ID NO: 84 | MEDICAGO TRUNCATULA | REC8 | PN |
| SEQ ID NO: 85 | MEDICAGO TRUNCATULA | REC8 | PP |
| SEQ ID NO: 86 | ORYZA SATIVA | REC8 | PN |
| SEQ ID NO: 87 | ORYZA SATIVA | REC8 | PP |
| SEQ ID NO: 88 | SETARIA ITALICA | REC8 | PN |
| SEQ ID NO: 89 | SETARIA ITALICA | REC8 | PP |
| SEQ ID NO: 90 | SORGHUM BICOLOR | REC8 | PN |
| SEQ ID NO: 91 | SORGHUM BICOLOR | REC8 | PP |
| SEQ ID NO: 92 | VITIS VINIFERA | REC8 | PN |
| SEQ ID NO: 93 | VITIS VINIFERA | REC8 | PP |
| SEQ ID NO: 94 | ZEA MAYS | REC8 | PN |
| SEQ ID NO: 95 | ZEA MAYS | REC8 | PP |
| SEQ ID NO: 96 | BRASSICA NAPUS | CENP-C | PN |
| SEQ ID NO: 97 | BRASSICA NAPUS | CENP-C | PP |
| SEQ ID NO: 98 | BRASSICA NAPUS | CENP-C | PN |
| SEQ ID NO: 99 | BRASSICA NAPUS | CENP-C | PP |
| SEQ ID NO: 100 | BRASSICA RAPA | CENP-C | PN |
| SEQ ID NO: 101 | BRASSICA RAPA | CENP-C | PP |
| SEQ ID NO: 102 | BRASSICA RAPA | CENP-C | PN |
| SEQ ID NO: 103 | GLYCINE MAX | CENP-C | PN |
| SEQ ID NO: 104 | GLYCINE MAX | CENP-C | PP |
| SEQ ID NO: 105 | GLYCINE MAX | CENP-C | PN |
| SEQ ID NO: 106 | GLYCINE MAX | CENP-C | PP |
| SEQ ID NO: 107 | MEDICAGO TRUNCATULA | CENP-C | PN |
| SEQ ID NO: 108 | MEDICAGO TRUNCATULA | CENP-C | PP |
| SEQ ID NO: 109 | ORYZA SATIVA | CENP-C | PN |
| SEQ ID NO: 110 | ORYZA SATIVA | CENP-C | PP |
| SEQ ID NO: 111 | SETARIA ITALICA | CENP-C | PN |
| SEQ ID NO: 112 | SETARIA ITALICA | CENP-C | PP |
| SEQ ID NO: 113 | SORGHUM BICOLOR | CENP-C | PN |
| SEQ ID NO: 114 | SORGHUM BICOLOR | CENP-C | PP |
| SEQ ID NO: 115 | ZEA MAYS | CENP-C | PN |
| SEQ ID NO: 116 | ZEA MAYS | CENP-C | PP |
| SEQ ID NO: 117 | ZEA MAYS | CENP-C | PN |
| SEQ ID NO: 118 | ZEA MAYS | CENP-C | PP |
| SEQ ID NO: 119 | ZEA MAYS | CENP-C | PN |
| SEQ ID NO: 120 | ZEA MAYS | CENP-C | PP |
| SEQ ID NO: 121 | BRASSICA NAPUS | MIS12 | PN |
| SEQ ID NO: 122 | BRASSICA NAPUS | MIS12 | PN |
| SEQ ID NO: 123 | BRASSICA NAPUS | MIS12 | PP |
| SEQ ID NO: 124 | BRASSICA RAPA | MIS12 | PN |
| SEQ ID NO: 125 | BRASSICA RAPA | MIS12 | PP |
| SEQ ID NO: 126 | GLYCINE MAX | MIS12 | PN |
| SEQ ID NO: 127 | GLYCINE MAX | MIS12 | PP |
| SEQ ID NO: 128 | GLYCINE MA | MIS12 | PN |
| SEQ ID NO: 129 | GLYCINE MAX | MIS12 | PP |
| SEQ ID NO: 130 | MEDICAGO TRUNCATULA | MIS12 | PN |
| SEQ ID NO: 131 | MEDICAGO TRUNCATULA | MIS12 | PP |
| SEQ ID NO: 132 | MEDICAGO TRUNCATULA | MIS12 | PN |
| SEQ ID NO: 133 | MEDICAGO TRUNCATULA | MIS12 | PP |
| SEQ ID NO: 134 | ORYZA SATIVA | MIS12 | PN |
| SEQ ID NO: 135 | ORYZA SATIVA | MIS12 | PP |
| SEQ ID NO: 136 | SORGHUM BICOLOR | MIS12 | PN |
| SEQ ID NO: 137 | SORGHUM BICOLOR | MIS12 | PP |
| SEQ ID NO: 138 | VITIS VINIFERA | MIS12 | PN |
| SEQ ID NO: 139 | VITIS VINIFERA | MIS12 | PP |
| SEQ ID NO: 140 | ZEA MAYS | MIS12 | PN |
| SEQ ID NO: 141 | ZEA MAYS | MIS12 | PP |
| SEQ ID NO: 142 | ZEA MAYS | MIS12 | PN |
| SEQ ID NO: 143 | ZEA MAYS | MIS12 | PP |
| SEQ ID NO: 144 | BRASSICA NAPUS | NUF2 | PN |
| SEQ ID NO: 145 | BRASSICA NAPUS | NUF2 | PP |
| SEQ ID NO: 146 | BRASSOCA NAPUS | NUF2 | PN |
| SEQ ID NO: 147 | BRASSICA RAPA | NUF2 | PN |
| SEQ ID NO: 148 | BRASSICA RAPA | NUF2 | PP |
| SEQ ID NO: 149 | GLYCINE MAX | NUF2 | PN |
| SEQ ID NO: 150 | GLYCINE MAX | NUF2 | PP |
| SEQ ID NO: 151 | MEDICAGO TRUNCATULA | NUF2 | PN |
| SEQ ID NO: 152 | MEDICAGO TRUNCATULA | NUF2 | PP |
| SEQ ID NO: 153 | MEDICAGO TRUNCATULA | NUF2 | PN |
| SEQ ID NO: 154 | MEDICAGO TRUNCATULA | NUF2 | PP |
| SEQ ID NO: 155 | ORYZA SATIVA | NUF2 | PN |
| SEQ ID NO: 156 | ORYZA SATIVA | NUF2 | PP |
| SEQ ID NO: 157 | ORYZA SATIVA | NUF2 | PN |
| SEQ ID NO: 158 | ORYZA SATIVA | NUF2 | PP |
| SEQ ID NO: 159 | SETARIA ITALICA | NUF2 | PN |
| SEQ ID NO: 160 | SETARIA ITALICA | NUF2 | PP |
| SEQ ID NO: 161 | SORGHUM BICOLOR | NUF2 | PN |
| SEQ ID NO: 162 | SORGHUM BICOLOR | NUF2 | PP |
| SEQ ID NO: 163 | SORGHUM BICOLOR | NUF2 | PN |
| SEQ ID NO: 164 | SORGHUM BICOLOR | NUF2 | PP |
| SEQ ID NO: 165 | SORGHUM BICOLOR | NUF2 | PN |
| SEQ ID NO: 166 | SORGHUM BICOLOR | NUF2 | PP |
| SEQ ID NO: 167 | VITIS VINIFERA | NUF2 | PN |
| SEQ ID NO: 168 | VITIS VINIFERA | NUF2 | PP |
| SEQ ID NO: 169 | VITIS VINIFERA | NUF2 | PN |
| SEQ ID NO: 170 | VITIS VINIFERA | NUF2 | PP |
| SEQ ID NO: 171 | ZEA MAYS | NUF2 | PN |
| SEQ ID NO: 172 | ZEA MAYS | NUF2 | PP |
| SEQ ID NO: 173 | ZEA MAYS | NUF2 | PN |
| SEQ ID NO: 174 | ZEA MAYS | NUF2 | PP |
| SEQ ID NO: 175 | BRASSICA NAPUS | PRD1 | PN |
| SEQ ID NO: 176 | BRASSICA RAPA | PRD1 | PN |
| SEQ ID NO: 177 | BRASSICA RAPA | PRD1 | PP |
| SEQ ID NO: 178 | GLYCINE MAX | PRD1 | PN |
| SEQ ID NO: 179 | GLYCINE MAX | PRD1 | PP |
| SEQ ID NO: 180 | GLYCINE MAX | PRD1 | PN |
| SEQ ID NO: 181 | GLYCINE MAX | PRD1 | PP |
| SEQ ID NO: 182 | MEDICAGO TRUNCATULA | PRD1 | PN |
| SEQ ID NO: 183 | MEDICAGO TRUNCATULA | PRD1 | PP |
| SEQ ID NO: 184 | ORYZA SATIVA | PRD1 | PN |
| SEQ ID NO: 185 | ORYZA SATIVA | PRD1 | PP |
| SEQ ID NO: 186 | SETARIA ITALICA | PRD1 | PN |
| SEQ ID NO: 187 | SETARIA ITALICA | PRD1 | PP |
| SEQ ID NO: 188 | SORGHUM BICOLOR | PRD1 | PN |
| SEQ ID NO: 189 | SORGHUM BICOLOR | PRD1 | PP |
| SEQ ID NO: 190 | VITIS VINIFERA | PRD1 | PN |
| SEQ ID NO: 191 | VITIS VINIFERA | PRD1 | PP |
| SEQ ID NO: 192 | ZEA MAYS | PRD1 | PN |
| SEQ ID NO: 193 | ZEA MAYS | PRD1 | PP |
| SEQ ID NO: 194 | BRASSICA NAPUS | PRD2 | PN |
| SEQ ID NO: 195 | BRASSICA RAPA | PRD2 | PN |
| SEQ ID NO: 196 | BRASSICA RAPA | PRD2 | PP |
| SEQ ID NO: 197 | BRASSICA RAPA | PRD2 | PN |
| SEQ ID NO: 198 | BRASSICA RAPA | PRD2 | PP |
| SEQ ID NO: 199 | GLYCINE MAX | PRD2 | PN |
| SEQ ID NO: 200 | GLYCINE MAX | PRD2 | PP |
| SEQ ID NO: 201 | GLYCINE MAX | PRD2 | PN |
| SEQ ID NO: 202 | GLYCINE MAX | PRD2 | PP |
| SEQ ID NO: 203 | MEDICAGO TRUNCATULA | PRD2 | PN |
| SEQ ID NO: 204 | MEDICAGO TRUNCATULA | PRD2 | PP |
| SEQ ID NO: 205 | ORYZA SATIVA | PRD2 | PN |
| SEQ ID NO: 206 | ORYZA SATIVA | PRD2 | PP |
| SEQ ID NO: 207 | SETARIA ITALICA | PRD2 | PN |
| SEQ ID NO: 208 | SETARIA ITALICA | PRD2 | PP |
| SEQ ID NO: 209 | SORGHUM BICOLOR | PRD2 | PN |
| SEQ ID NO: 210 | SORGHUM BICOLOR | PRD2 | PP |
| SEQ ID NO: 211 | VITIS VINIFERA | PRD2 | PN |
| SEQ ID NO: 212 | VITIS VINIFERA | PRD2 | PP |
| SEQ ID NO: 213 | ZEA MAYS | PRD2 | PN |
| SEQ ID NO: 214 | :ZEA MAYS | PRD2 | PP |
| SEQ ID NO: 215 | BRASSICA NAPUS | PRD3 | PN |
| SEQ ID NO: 216 | BRASSICA RAPA | PRD3 | PN |
| SEQ ID NO: 217 | BRASSICA RAPA | PRD3 | PP |
| SEQ ID NO: 218 | BRASSICA RAPA | PRD3 | PN |
| SEQ ID NO: 219 | BRASSICA RAPA | PRD3 | PP |
| SEQ ID NO: 220 | GLYCINE MAX | PRD3 | PN |
| SEQ ID NO: 221 | GLYCINE MAX | PRD3 | PP |
| SEQ ID NO: 222 | GLYCINE MAX | PRD3 | PN |
| SEQ ID NO: 223 | GLYCINE MAX | PRD3 | PP |
| SEQ ID NO: 224 | MEDICAGO TRUNCATULA | PRD3 | PN |
| SEQ ID NO: 225 | MEDICAGO TRUNCATULA | PRD3 | PP |
| SEQ ID NO: 226 | ORYZA SATIVA | PRD3 | PN |
| SEQ ID NO: 227 | ORYZA SATIVA | PRD3 | PP |
| SEQ ID NO: 228 | SETARIA ITALICA | PRD3 | PN |
| SEQ ID NO: 229 | SETARIA ITALICA | PRD3 | PP |
| SEQ ID NO: 230 | SORGHUM BICOLOR | PRD3 | PN |
| SEQ ID NO: 231 | SORGHUM BICOLOR | PRD3 | PP |
| SEQ ID NO: 232 | VITIS VINIFERA | PRD3 | PN |
| SEQ ID NO: 233 | VITIS VINIFERA | PRD3 | PP |
| SEQ ID NO: 234 | VITIS VINIFERA | PRD3 | PN |
| SEQ ID NO: 235 | ZEA MAYS | PRD3 | PN |
| SEQ ID NO: 236 | ZEA MAYS | PRD3 | PP |
| SEQ ID NO: 237 | ZEA MAYS | PRD3 | PN |
| SEQ ID NO: 238 | ZEA MAYS | PRD3 | PP |
| SEQ ID NO: 239 | ARABIDOPSIS THALIANA | CENP-O | PN |
| SEQ ID NO: 240 | ARABIDOPSIS THALIANA | CENP-O | PP |
| SEQ ID NO: 241 | BRASSICA NAPUS | CENP-O | PN |
| SEQ ID NO: 242 | BRASSICA RAPA | CENP-O | PN |
| SEQ ID NO: 243 | BRASSICA RAPA | CENP-O | PP |
| SEQ ID NO: 244 | GLYCINE MAX | CENP-O | PN |
| SEQ ID NO: 245 | GLYCINE MAX | CENP-O | PP |
| SEQ ID NO: 246 | GLYCINE MAX | CENP-O | PN |
| SEQ ID NO: 247 | GLYCINE MAX | CENP-O | PP |
| SEQ ID NO: 248 | GLYCINE MAX | CENP-O | PN |
| SEQ ID NO: 249 | GLYCINE MAX | CENP-O | PP |
| SEQ ID NO: 250 | MEDICAGO TRUNCATULA | CENP-O | PN |
| SEQ ID NO: 251 | MEDICAGO TRUNCATULA | CENP-O | PP |
| SEQ ID NO: 252 | ORYZA SATIVA | CENP-O | PN |
| SEQ ID NO: 253 | ORYZA SATIVA | CENP-O | PP |
| SEQ ID NO: 254 | SETARIA ITALICA | CENP-O | PN |
| SEQ ID NO: 255 | SETARIA ITALICA | CENP-O | PP |
| SEQ ID NO: 256 | SETARIA ITALICA | CENP-O | PN |
| SEQ ID NO: 257 | SETARIA ITALICA | CENP-O | PP |
| SEQ ID NO: 258 | SETARIA ITALICA | CENP-O | PN |
| SEQ ID NO: 259 | SETARIA ITALICA | CENP-O | PP |
| SEQ ID NO: 260 | SORGHUM BICOLOR | CENP-O | PN |
| SEQ ID NO: 261 | SORGHUM BICOLOR | CENP-O | PP |
| SEQ ID NO: 262 | SORGHUM BICOLOR | CENP-O | PN |
| SEQ ID NO: 263 | SORGHUM BICOLOR | CENP-O | PN |
| SEQ ID NO: 264 | VITIS VINIFERA | CENP-O | PN |
| SEQ ID NO: 265 | VITIS VINIFERA | CENP-O | PP |
| SEQ ID NO: 266 | ZEA MAYS | CENP-O | PN |
| SEQ ID NO: 267 | ZEA MAYS | CENP-O | PP |
| SEQ ID NO: 268 | ZEA MAYS | CENP-O | PN |
| SEQ ID NO: 269 | ZEA MAYS | CENP-O | PP |
| SEQ ID NO: 270 | ZEA MAYS | CENP-O | PN |
| SEQ ID NO: 271 | ZEA MAYS | CENP-O | PP |
| SEQ ID NO: 272 | GLYCINE MAX | REC8 | PN |
| SEQ ID NO: 273 | GLYCINE MAX | REC8 | PN |
| SEQ ID NO: 274 | GLYCINE MAX | REC8 | PN |

[0055] A. Silencing Elements

[0056] Further provided are nucleic acid molecules comprising nucleotide sequences encoding inhibitory nucleic acids, and fragments and variants thereof that are useful in decreasing the level of proteins responsible for normal meiosis and wild-type kinetochore activity. Such fragments and variants are useful in silencing elements and suppression cassettes.

[0057] By “silencing elements” is intended polynucleotides that can reduce or eliminate the expression level of a target sequence by influencing the level of the target RNA transcript or, alternatively, by influencing translation and thereby affecting the level of the encoded polypeptide. As used herein, a “target sequence” or “target polynucleotide” comprises any sequence that one desires to reduce the level of expression. In specific embodiments, the target sequence comprises the nucleotide sequence set forth in SEQ ID NO: 2, 3 and 4 and decreasing the level of expression of the target sequence results in an alteration of normal meiosis activity. In other embodiments, the target sequence comprises the nucleotide sequence set forth in SEQ ID NO: 5. Methods to assay for functional silencing elements that are capable of reducing or eliminating the level of a sequence of interest are known in the art.

[0058] As discussed in further detail below, silencing elements can include, but are not limited to, a sense suppression element, an antisense suppression element, a double stranded RNA, an siRNA, an amiRNA, an miRNA or a hairpin suppression element. Non-limiting examples of silencing elements that can be employed to decreased expression of meiosis-related genes or CENH3 genes comprise fragments and variants of the sense or antisense sequence of the sequences set forth in SEQ ID NOs: 2, 3, 4 and/or 5. In other embodiments, dominant negative mutants or protein fragments may be used to suppress target function.

[0059] i. Sense Suppression Elements

[0060] Silencing elements of the invention may comprise a sense suppression element. As used herein, a “sense suppression element” comprises a polynucleotide designed to express an RNA molecule corresponding to at least a part of a target messenger RNA in the “sense” orientation. Expression of the RNA molecule comprising the sense suppression element reduces or eliminates the level of the target polynucleotide or the polypeptide encoded thereby. The polynucleotide comprising the sense suppression element may correspond to all or part of the sequence of the target polynucleotide, all or part of the 5′ and/or 3′ untranslated region of the target polynucleotide, all or part of the coding sequence of the target polynucleotide or all or part of both the coding sequence and the untranslated regions of the target polynucleotide.

[0061] Typically, a sense suppression element has substantial sequence identity to the target polynucleotide, typically greater than about 65% sequence identity, greater than about 85% sequence identity, about 90%, 91%, 92%, 93%, 94%, 95%, 96%, 97%, 98% or 99% sequence identity. See, U.S. Pat. Nos. 5,283,184 and 5,034,323, herein incorporated by reference. The sense suppression element can be any length so long as it allows for the suppression of the targeted sequence. The sense suppression element can be, for example, the full-length nucleotide sequence of SEQ ID NO: 2, 3, 4 and 5 or about 10, 15, 16, 17, 18, 19, 20, 22, 25, 30, 50, 100, 150, 200, 250, 300, 350, 400, 450, 500 nucleotides or longer of the nucleotides set forth in SEQ ID NO: 2, 3, 4 and 5. In other embodiments, the sense suppression element can be, for example, the full-length nucleotide sequence of SEQ ID NO: 2, 3, 4 and 5 or about 10, 15, 16, 17, 18, 19, 20, 22, 25, 30, 50, 100, 150, 200, 250, 300, 350, 400, 450, 500, 600, 700, 900, 1000, 1100, 1200, 1300, 1400, 1500 nucleotides or longer of the nucleotides set forth in SEQ ID NO: 2, 3, 4 and 5.

[0062] ii. Antisense Suppression Elements

[0063] Silencing elements of the invention may comprise an antisense suppression element. As used herein, an “antisense suppression element” comprises a polynucleotide that is designed to express an RNA molecule complementary to all or part of a target messenger RNA. Expression of the antisense RNA suppression element reduces or eliminates the level of the target polynucleotide. The polynucleotide for use in antisense suppression may correspond to all or part of the complement of the sequence encoding the target polynucleotide, all or part of the complement of the 5′ and/or 3′ untranslated region of the target polynucleotide, all or part of the complement of the coding sequence of the target polynucleotide or all or part of the complement of both the coding sequence and the untranslated regions of the target polynucleotide. In addition, the antisense suppression element may be fully complementary (i.e., 100% identical to the complement of the target sequence) or partially complementary (i.e., less than 100% identical to the complement of the target sequence) to the target polynucleotide. In specific embodiments, the antisense suppression element comprises at least 85%, 90%, 91%, 92%, 93%, 94%, 95%, 96%, 97%, 98% or 99% sequence complementarity to the target polynucleotide. Antisense suppression may be used to inhibit the expression of multiple proteins in the same plant. See, for example, U.S. Pat. No. 5,942,657. Furthermore, the antisense suppression element can be complementary to a portion of the target polynucleotide.

[0064] In one example, sequences of at least about 15, 16, 17, 18, 19, 20, 22, 25, 50, 100, 200, 300, 400, 450, 500 nucleotides or longer of the nucleotides set forth in SEQ ID NO: 2, 3, 4 and 5 or a complement thereof, may be used. In another example, sequences of at least about 15, 16, 17, 18, 19, 20, 22, 25, 50, 100, 200, 300, 400, 450, 500, 600, 700, 900, 1000, 1100, 1200, 1300, 1400, 1500 nucleotides or longer of the nucleotides set forth in SEQ ID NO: 2, 3, 4 and 5 or a complement thereof, may be used. Methods for using antisense suppression to inhibit the expression of endogenous genes in plants are described, for example, in Liu, et al., (2002) Plant Physiol. 129:1732-1743 and U.S. Pat. Nos. 5,759,829 and 5,942,657, each of which is herein incorporated by reference.

[0065] iii. Double Stranded RNA Suppression Element

[0066] Silencing elements of the invention may comprise a double stranded RNA silencing element. A “double stranded RNA silencing element” or “dsRNA” comprises at least one transcript that is capable of forming a dsRNA. Thus, a “dsRNA silencing element” includes a dsRNA, a transcript or polyribonucleotide capable of forming a dsRNA or more than one transcript or polyribonucleotide capable of forming a dsRNA. “Double stranded RNA” or “dsRNA” refers to a polyribonucleotide structure formed either by a single self-complementary RNA molecule or a polyribonucleotide structure formed by the expression of least two distinct RNA strands. The dsRNA molecule(s) employed in the methods and compositions of the invention mediate the reduction of expression of a target sequence, for example, by mediating RNA interference “RNAi” or gene silencing in a sequence-specific manner. In the context of the present invention, the dsRNA is capable of reducing or eliminating the level or expression of a target polynucleotide or the polypeptide encoded thereby in a plant.

[0067] The dsRNA can reduce or eliminate the expression level of the target sequence by influencing the level of the target RNA transcript, by influencing translation and thereby affecting the level of the encoded polypeptide or by influencing expression at the pre-transcriptional level (i.e., via the modulation of chromatin structure, methylation pattern, etc., to alter gene expression). See, for example, Verdel, et al., (2004) Science 303:672-676; Pal-Bhadra, et al., (2004) Science 303:669-672; Allshire, (2002) Science 297:1818-1819; Volpe, et al., (2002) Science 297:1833-1837; Jenuwein, (2002) Science 297:2215-2218 and Hall, et al., (2002) Science 297:2232-2237. Methods to assay for functional dsRNA that are capable of reducing or eliminating the level of a sequence of interest are disclosed elsewhere herein. Accordingly, as used herein, the term “dsRNA” is meant to encompass other terms used to describe nucleic acid molecules that are capable of mediating RNA interference or gene silencing, including, for example, short-interfering RNA (sRNA), double-stranded RNA (dsRNA), micro-RNA (miRNA), artificial micro-RNA (amiRNA), hairpin RNA, short hairpin RNA (shRNA), post-transcriptional gene silencing RNA (ptgsRNA) and others.

[0068] In specific embodiments, at least one strand of the duplex or double-stranded region of the dsRNA shares sufficient sequence identity or sequence complementarity to the target polynucleotide to allow for the dsRNA to reduce the level of expression of the target sequence. As used herein, the strand that is complementary to the target polynucleotide is the “antisense strand” and the strand homologous to the target polynucleotide is the “sense strand.”

[0069] In another embodiment, the dsRNA comprises a hairpin RNA. A hairpin RNA comprises an RNA molecule that is capable of folding back onto itself to form a double-stranded structure. Multiple structures can be employed as hairpin elements. In specific embodiments, the dsRNA suppression element comprises a hairpin element that comprises in the following order, a first segment, a second segment and a third segment, where the first and the third segment share sufficient complementarity to allow the transcribed RNA to form a double-stranded stem-loop structure.

[0070] The “second segment” of the hairpin comprises a “loop” or a “loop region.” These terms are used synonymously herein and are to be construed broadly to comprise any nucleotide sequence that confers enough flexibility to allow self-pairing to occur between complementary regions of a polynucleotide (i.e., segments 1 and 3 which form the stem of the hairpin). For example, in some embodiments, the loop region may be substantially single stranded and act as a spacer between the self-complementary regions of the hairpin stem-loop. In some embodiments, the loop region can comprise a random or nonsense nucleotide sequence and thus not share sequence identity to a target polynucleotide. In other embodiments, the loop region comprises a sense or an antisense RNA sequence or fragment thereof that shares identity to a target polynucleotide. See, for example, International Patent Publication Number WO 2002/00904, herein incorporated by reference. In specific embodiments, the loop region can be optimized to be as short as possible while still providing enough intramolecular flexibility to allow the formation of the base-paired stem region. Accordingly, the loop sequence is generally less than about 1500, 1400, 1300, 1200, 1100, 1000, 900, 800, 700, 600, 500, 400, 300, 200, 100, 50, 25, 20, 19, 18, 17, 16, 15, 10 nucleotides or less. The “first” and the “third” segment of the hairpin RNA molecule comprise the base-paired stem of the hairpin structure. The first and the third segments are inverted repeats of one another and share sufficient complementarity to allow the formation of the base-paired stem region. In specific embodiments, the first and the third segments are fully complementary to one another. Alternatively, the first and the third segment may be partially complementary to each other so long as they are capable of hybridizing to one another to form a base-paired stem region. The amount of complementarity between the first and the third segment can be calculated as a percentage of the entire segment. Thus, the first and the third segment of the hairpin RNA generally share at least 50%, 60%, 70%, 80%, 85%, 90%, 91%, 92%, 93%, 94%, 95%, 96%, 97%, 98%, 99%, up to and including 100% complementarity.

[0071] In specific embodiments, the sequences used in the first, the second and/or the third segments comprise domains that are designed to have sufficient sequence identity to a target polynucleotide of interest and thereby have the ability to decrease the level of expression of the target polynucleotide. The specificity of the inhibitory RNA transcripts is therefore generally conferred by these domains of the silencing element. Thus, in some embodiments of the invention, the first, second and/or third segment of the silencing element comprise a domain having at least 10, at least 15, at least 19, at least 20, at least 21, at least 22, at least 23, at least 24, at least 25, at least 30, at least 40, at least 50, at least 100, at least 200, at least 300, at least 500, at least 1000 or more than 1000 nucleotides that share sufficient sequence identity to the target polynucleotide to allow for a decrease in expression levels of the target polynucleotide when expressed in an appropriate cell.

[0072] In further embodiments, the domain of the first, the second and/or the third segment has 100% sequence identity to the target polynucleotide. In other embodiments, the domain of the first, the second and/or the third segment having homology to the target polypeptide have at least 50%, 60%, 70%, 80%, 85%, 90%, 91%, 92%, 93%, 94%, 95%, 96%, 97%, 98%, 99% or greater sequence identity to a region of the target polynucleotide. The sequence identity of the domains of the first, the second and/or the third segments to the target polynucleotide need only be sufficient to decrease expression of the target polynucleotide of interest. See, for example, Chuang and Meyerowitz, (2000) Proc. Natl. Acad. Sci. USA 97:4985-4990; Stoutjesdijk, et al., (2002) Plant Physiol. 129:1723-1731; Waterhouse and Helliwell, (2003) Nat. Rev. Genet. 4:29-38; Pandolfini, et al., BMC Biotechnology 3:7 and US Patent Application Publication Number 2003/0175965, each of which is herein incorporated by reference. A transient assay for the efficiency of hairpin RNA constructs to silence gene expression in vivo has been described by Panstruga, et al., (2003) Mol. Biol. Rep. 30:135-140, herein incorporated by reference.

[0073] The amount of complementarity shared between the first, second and/or third segment and the target polynucleotide or the amount of complementarity shared between the first segment and the third segment (i.e., the stem of the hairpin structure) may vary depending on the organism in which gene expression is to be controlled. Some organisms or cell types may require exact pairing or 100% identity, while other organisms or cell types may tolerate some mismatching.

[0074] Any region of the target polynucleotide can be used to design the domain of the silencing element that shares sufficient sequence identity to allow expression of the hairpin transcript to decrease the level of the target polynucleotide. For instance, the domain can be designed to share sequence identity to the 5′ untranslated region of the target polynucleotide(s), the 3′ untranslated region of the target polynucleotide(s), exonic regions of the target polynucleotide(s), intronic regions of the target polynucleotide(s) and any combination thereof. In some instances, to optimize the siRNA sequences employed in the hairpin, the synthetic oligodeoxyribonucleotide/RNAse H method can be used to determine sites on the target mRNA that are in a conformation that is susceptible to RNA silencing. See, for example, Vickers, et al., (2003) J. Biol. Chem 278:7108-7118 and Yang, et al., (2002) Proc. Natl. Acad. Sci. USA 99:9442-9447, herein incorporated by reference. These studies indicate that there is a significant correlation between the RNase-H-sensitive sites and sites that promote efficient siRNA-directed mRNA degradation.

[0075] In particular embodiments, the hairpin RNAs of the invention may also comprise an intron. For such intron-containing hairpin RNAs, the interfering molecules have the same general structure as for the hairpin RNAs described herein above, but the RNA molecule additionally comprises an intron that is capable of being spliced in the cell in which the hairpin RNA is expressed. The use of an intron minimizes the size of the loop in the hairpin RNA molecule following splicing and this increases the efficiency of interference. See, for example, Smith, et al., (2000) Nature 407:319-320. In fact, Smith, et al., show 100% suppression of endogenous gene expression using intron-containing hairpin RNA-mediated interference. Methods for using intron-containing hairpin RNA interference to inhibit the expression of endogenous plant genes are described, for example, in Smith, et al., (2000) Nature 407:319-320; Wesley, et al., (2001) Plant J. 27:581-590; Wang and Waterhouse, (2001) Curr. Opin. Plant Biol. 5:146-150; Waterhouse and Helliwell, (2003) Nat. Rev. Genet. 4:29-38; Helliwell and Waterhouse, (2003) Methods 30:289-295 and US Patent Application Publication Number 2003/0180945, each of which is herein incorporated by reference.

[0076] In addition, transcriptional gene silencing (TGS) may be accomplished through use of a hairpin suppression element where the inverted repeat of the hairpin shares sequence identity with the promoter region of a target polynucleotide to be silenced. See, for example, Aufsatz, et al., (2002) PNAS 99(4):16499-16506 and Mette, et al., (2000) EMBO J 19(19):5194-5201.

[0077] In other embodiments, the dsRNA can comprise a small RNA (sRNA). sRNAs can comprise both micro RNA (miRNA) and short-interfering RNA (siRNA) (Meister and Tuschl, (2004) Nature 431:343-349 and Bonetta, et al., (2004) Nature Methods 1:79-86). miRNAs are regulatory agents comprising about 19 ribonucleotides which are highly efficient at inhibiting the expression of target polynucleotides. See, for example, Javier, et al., (2003) Nature 425:257-263, herein incorporated by reference. For miRNA interference, the silencing element can be designed to express a dsRNA molecule that forms a hairpin structure containing a 19-nucleotide sequence that is complementary to the target polynucleotide of interest. The miRNA can be synthetically made or transcribed as a longer RNA which is subsequently cleaved to produce the active miRNA. Specifically, the miRNA can comprise 19 nucleotides of the sequence having homology to a target polynucleotide in sense orientation and 19 nucleotides of a corresponding antisense sequence that is complementary to the sense sequence.

[0078] When expressing an miRNA, it is recognized that various forms of an miRNA can be transcribed including, for example, the primary transcript (termed the “pri-miRNA”) which is processed through various nucleolytic steps to a shorter precursor miRNA (termed the “pre-miRNA”); the pre-miRNA; or the final (mature) miRNA is present in a duplex, the two strands being referred to as the miRNA (the strand that will eventually basepair with the target) and miRNA*. The pre-miRNA is a substrate for a form of dicer that removes the miRNA/miRNA* duplex from the precursor, after which, similarly to siRNAs, the duplex can be taken into the RISC complex. It has been demonstrated that miRNAs can be transgenically expressed and be effective through expression of a precursor form, rather than the entire primary form (Parizotto, et al., (2004) Genes & Development 18:2237-2242 and Guo, et al., (2005) Plant Cell 17:1376-1386).

[0079] Artificial microRNAs (amiRNAs) have recently been described in Arabidopsis targeting viral mRNA sequences (Niu, et al., (2006) Nature Biotechnology 24:1420-1428) or endogenous genes (Schwab, et al., (2006) Plant Cell 18:1121-1133). The amiRNA construct can be expressed under different promoters in order to change the spatial pattern of silencing (Schwab, et al., (2006) Plant Cell 18:1121-1133). Artificial miRNAs replace the microRNA and its complementary star sequence in a precursor miRNA and substitute sequences that target an mRNA to be silenced. Silencing by endogenous miRNAs can be found in a variety of spatial, temporal and developmental expression patterns (Parizotto, et al., (2007) Genes Dev 18:2237-2242; Alvarez, et al., (2006) Plant Cell 18:1134-51). Artificial miRNA can be constructed to both capture and extend the diversity and specificity in the patterns of silencing.

[0080] The methods and compositions of the invention can employ silencing elements that, when transcribed, form a dsRNA molecule. Accordingly, the heterologous polynucleotide being expressed need not form the dsRNA by itself, but can interact with other sequences in the plant cell to allow the formation of the dsRNA. For example, a chimeric polynucleotide that can selectively silence the target polynucleotide can be generated by expressing a chimeric construct comprising the target sequence for a miRNA or siRNA to a sequence corresponding to all or part of the gene or genes to be silenced. In this embodiment, the dsRNA is “formed” when the target for the miRNA or siRNA interacts with the miRNA present in the cell. The resulting dsRNA can then reduce the level of expression of the gene or genes to be silenced. See, for example, US Patent Application Publication 2007/0130653, entitled “Methods and Compositions for Gene Silencing”, herein incorporated by reference. The construct can be designed to have a target for an endogenous miRNA or alternatively, a target for a heterologous and/or synthetic miRNA can be employed in the construct. If a heterologous and/or synthetic miRNA is employed, it can be introduced into the cell on the same nucleotide construct as the chimeric polynucleotide or on a separate construct. As discussed elsewhere herein, any method can be used to introduce the construct comprising the heterologous miRNA.

[0081] In specific embodiments, the compositions of the invention include nucleic acid molecules that comprise the nucleotide sequence of Spo11-1 (SEQ ID NO: 2), Osd1 (SEQ ID NO: 3), Rec8 (SEQ ID NO: 4) and CENH3 (SEQ ID NO: 5) nucleotide sequences. Alternatively, such nucleic acid molecules comprise a nucleotide sequence that selectively hybridizes with SEQ ID NOS: 2, 3, 4 and/or 5. Furthermore, such isolated polynucleotides may comprise a nucleotide sequence comprising the complementary sequence to SEQ ID NOS: 2, 3, 4 and/or 5 or the complementary sequence to a nucleotide sequence that selectively hybridizes with SEQ ID NOS: 2, 3, 4 and/or 5.

[0082] B. Transactivator Elements

[0083] Transactivator elements are provided herein for use in regulating the expression of genes of interest by selectively activating inducible promoters. For example, the polynucleotides encoding transactivator proteins of the invention can be placed under the control of a constitutive, tissue-specific or other transactivator-inducible promoter to control the expression of a nucleotide of interest operably linked to a transactivator-inducible promoter. In some embodiments, a polynucleotide encoding a transactivator protein can be provided on an expression cassette in a separate plant from the expression or suppression cassette comprising the corresponding transactivator-inducible promoter. Expression cassettes provided herein comprising polynucleotides encoding transactivator proteins can further comprise operably linked promoters that drive expression of the transactivator in a plant. As used herein, “transactivator A” and “transactivator B” refer to any transactivator element used for regulating the expression of genes of interest by selectively activating inducible promoters. Examples of transactivators include the GAL4DBD-VP16/UAS PRO system, the T7 polymerase/T7 PRO system and the LexA transactivator system commonly known in the art or any combination thereof (Yagi, et al., (2010) Proc. Natl. Acad. Sci. 107(37):16166-16171).

[0084] As used herein, “transactivator promoter” refers to a promoter operably linked to a polynucleotide encoding a transactivator. In specific embodiments, expression cassettes are provided encoding a polynucleotide encoding a transactivator operably linked to a constitutive or tissue-specific promoter. For example, the tissue-specific promoter operably linked to a polynucleotide encoding a transactivator can be an ovule-specific promoter wherein the transactivator is specifically expressed in the ovule of a plant. Such a transactivator specifically expressed in the ovule of a plant can activate the corresponding transactivator-inducible promoter resulting in the expression of a gene of interest only in the ovule. In one embodiment of the invention, a first plant comprising an expression cassette comprising a polynucleotide encoding transactivator A operably linked to an ovule-specific promoter is crossed with a second plant comprising a suppression cassette comprising a CENH3 silencing element operably linked to a transactivator A-inducible promoter. In the resulting progeny plant, the CENH3 silencing element is specifically expressed in the ovule.

[0085] In another embodiment of the invention, a first plant comprising an expression cassette comprising a polynucleotide encoding transactivator B under the control of a constitutive promoter is crossed with a second plant comprising a suppression cassette comprising a MiMe silencing element under the control of a transactivator-inducible promoter. In progeny from the resulting cross, the transactivator activates constitutive expression of the MiMe silencing element. In certain embodiments, an expression cassette comprising a polynucleotide encoding transactivator A is provided in the same plant as a suppression cassette comprising a transactivator B-inducible promoter, wherein transactivator A does not activate the expression of the transactivator B-inducible promoter.

[0086] C. Expression Cassettes and Suppression Cassettes

[0087] Compositions of the invention also encompass expression cassettes and suppression cassettes. It is recognized that the polynucleotides and silencing elements of the invention can be provided in expression cassettes and suppression cassettes, respectively, for expression in a plant of interest. Expression cassettes provided herein may comprise, for example, polynucleotides encoding a transactivator, an active CENH3 mutant and/or wild-type CENH3 or fragments or variants thereof. Suppression cassettes provided herein may, for example, comprise a silencing element as described herein above.

[0088] The expression and suppression cassettes of the invention can include 5′ and 3′ regulatory sequences operably linked to the polynucleotide or silencing elements of the invention. “Operably linked” is intended to mean a functional linkage between two or more elements. For example, an operable linkage between a polynucleotide and a regulatory sequence (i.e., a promoter) is a functional link that allows for expression of the polynucleotide of the invention. In particular examples, a polynucleotide or silencing element of the invention can be operably linked to a promoter that drives expression in a plant. Operably linked elements may be contiguous or non-contiguous. When used to refer to the joining of two protein coding regions, by operably linked is intended that the coding regions are in the same reading frame. The cassette may additionally contain at least one additional polynucleotide to be cotransformed into the organism. Alternatively, the additional polypeptide(s) can be provided on multiple expression cassettes. Expression and suppression cassettes can be provided with a plurality of restriction sites and/or recombination sites for insertion of the polynucleotide to be under the transcriptional regulation of the regulatory regions. The expression and suppression cassettes may additionally contain selectable marker genes.

[0089] The expression and suppression cassettes can include in the 5′-3′ direction of transcription, a transcriptional and translational initiation region (i.e., a promoter), a polynucleotide encoding a polypeptide or the silencing element(s) employed in the methods and compositions of the invention and a transcriptional and translational termination region (i.e., termination region) functional in plants. In those embodiments, where the suppression cassettes encode double stranded RNA the suppression cassette can comprise two convergent promoters that drive transcription of the operably linked silencing element. “Convergent promoters” refers to promoters that are oriented on either terminus of the operably linked silencing element such that each promoter drives transcription of the silencing element in opposite directions, yielding two transcripts. In such embodiments, the convergent promoters allow for the transcription of the sense and anti-sense strand and thus allow for the formation of a dsRNA.

[0090] The regulatory regions (i.e., promoters, transcriptional regulatory regions, and translational termination regions) and/or the polynucleotides or silencing elements employed in the invention may be native/analogous to the host cell or to each other. Alternatively, the regulatory regions and/or the polynucleotides or silencing elements employed in the invention may be heterologous to the host cell or to each other. As used herein, “heterologous” in reference to a sequence is a sequence that originates from a foreign species, or, if from the same species, is substantially modified from its native form in composition and/or genomic locus by deliberate human intervention. For example, a promoter operably linked to a heterologous polynucleotide is from a species different from the species from which the polynucleotide was derived, or, if from the same/analogous species, one or both are substantially modified from their original form and/or genomic locus or the promoter is not the native promoter for the operably linked polynucleotide. As used herein, a chimeric gene comprises a coding sequence operably linked to a transcription initiation region that is heterologous to the coding sequence.

[0091] The termination region may be native with the transcriptional initiation region, may be native with the operably linked polynucleotide encoding a polypeptide or silencing element, may be native with the plant host or may be derived from another source (i.e., foreign or heterologous) to the promoter, the polynucleotide, the silencing element, the plant host or any combination thereof. Convenient termination regions are available from the Ti-plasmid of A. tumefaciens, such as the octopine synthase and nopaline synthase termination regions. See also, Guerineau, et al., (1991) Mol. Gen. Genet. 262:141-144; Proudfoot, (1991) Cell 64:671-674; Sanfacon, et al., (1991) Genes Dev. 5:141-149; Mogen, et al., (1990) Plant Cell 2:1261-1272; Munroe, et al., (1990) Gene 91:151-158; Ballas, et al., (1989) Nucleic Acids Res. 17:7891-7903 and Joshi, et al., (1987) Nucleic Acids Res. 15:9627-9639.

[0092] Additional sequence modifications are known to enhance gene expression in a cellular host. These include elimination of sequences encoding spurious polyadenylation signals, exon-intron splice site signals, transposon-like repeats and other such well-characterized sequences that may be deleterious to gene expression. The G-C content of the sequence may be adjusted to levels average for a given cellular host, as calculated by reference to known genes expressed in the host cell. When possible, the sequence is modified to avoid predicted hairpin secondary mRNA structures.

[0093] In preparing the expression or suppression cassettes of the invention, various DNA fragments may be manipulated, so as to provide for the DNA sequences in the proper orientation and, as appropriate, in the proper reading frame. Toward this end, adapters or linkers may be employed to join the DNA fragments or other manipulations may be involved to provide for convenient restriction sites, removal of superfluous DNA, removal of restriction sites, or the like. For this purpose, in vitro mutagenesis, primer repair, restriction, annealing, resubstitutions, e.g., transitions and transversions, may be involved.

[0094] In particular embodiments, the silencing element of a suppression cassette may be operably linked to a promoter that drives expression of the silencing element in a plant. In other embodiments, polynucleotides encoding an active CENH3 mutant, wild-type CENH3 or transactivator of an expression cassette may be operably linked to a promoter that drives expression of the polynucleotide in a plant. It is recognized that a number of promoters can be used in the practice of the invention. Polynucleotides encoding silencing elements can be combined with constitutive, tissue-preferred, transactivator-inducible or other promoters for expression in plants.

[0095] Such constitutive promoters include, for example, the core promoter of the Rsyn7 promoter and other constitutive promoters disclosed in WO 1999/43838 and U.S. Pat. No. 6,072,050; the core CaMV 35S promoter (Odell, et al., (1985) Nature 313:810-812); rice actin (McElroy, et al., (1990) Plant Cell 2:163-171); ubiquitin (Christensen, et al., (1989) Plant Mol. Biol. 12:619-632 and Christensen, et al., (1992) Plant Mol. Biol. 18:675-689); pEMU (Last, et al., (1991) Theor. Appl. Genet. 81:581-588); MAS (Velten, et al., (1984) EMBO J. 3:2723-2730); ALS promoter (U.S. Pat. No. 5,659,026), and the like. Other constitutive promoters include, for example, U.S. Pat. Nos. 5,608,149; 5,608,144; 5,604,121; 5,569,597; 5,466,785; 5,399,680; 5,268,463; 5,608,142 and 6,177,611.

[0096] An inducible promoter, for instance, a transactivator-inducible promoter are provided. For example, transactivator-inducible promoters for use in the expression or suppression cassettes disclosed herein include: Gal4DBD::VP16/UAS; Gal4DBD::hypothetical activator domain/UAS; T7 Polymerase/T7 promoter; other proprietary systems; in theory: unique DNA binding domain::activation domain/DNA recognition element::minimal promoter element as demonstrated in numerous novel fusions in plant transient experimental systems.

[0097] Chemical-regulated promoters can be used to modulate the expression of a gene in a plant through the application of an exogenous chemical regulator. Depending upon the objective, the promoter may be a chemical-inducible promoter, where application of the chemical induces gene expression or a chemical-repressible promoter, where application of the chemical represses gene expression. Chemical-inducible promoters are known in the art and include, but are not limited to, the maize In2-2 promoter, which is activated by benzenesulfonamide herbicide safeners, the maize GST promoter, which is activated by hydrophobic electrophilic compounds that are used as pre-emergent herbicides, and the tobacco PR-1 a promoter, which is activated by salicylic acid. Other chemical-regulated promoters of interest include steroid-responsive promoters (see, for example, the glucocorticoid-inducible promoter in Schena, et al., (1991) Proc. Natl. Acad. Sci. USA 88:10421-10425 and McNellis, et al., (1998) Plant J. 14(2):247-257) and tetracycline-inducible and tetracycline-repressible promoters (see, for example, Gatz, et al., (1991) Mol. Gen. Genet. 227:229-237 and U.S. Pat. Nos. 5,814,618 and 5,789,156), herein incorporated by reference.

[0098] Tissue-preferred promoters can be utilized to target enhanced expression within a particular plant tissue. Tissue-preferred promoters include Yamamoto, et al., (1997) Plant J. 12(2):255-265; Kawamata, et al., (1997) Plant Cell Physiol. 38(7):792-803; Hansen, et al., (1997) Mol. Gen Genet. 254(3):337-343; Russell, et al., (1997) Transgenic Res. 6(2):157-168; Rinehart, et al., (1996) Plant Physiol. 112(3):1331-1341; Van Camp, et al., (1996) Plant Physiol. 112(2):525-535; Canevascini, et al., (1996) Plant Physiol. 112(2):513-524; Yamamoto, et al., (1994) Plant Cell Physiol. 35(5):773-778; Lam, (1994) Results Probl. Cell Differ. 20:181-196; Orozco, et al., (1993) Plant Mol Biol. 23(6):1129-1138; Matsuoka, et al., (1993) Proc Natl. Acad. Sci. USA 90(20):9586-9590 and Guevara-Garcia, et al., (1993) Plant J. 4(3):495-505. Such promoters can be modified, if necessary, for weak expression.

[0099] Egg cell-specific promoters, central cell-specific promoters, and pollen specific promoters can be utilized to confine expression of silencing elements, active CENH3 mutants or wild-type CENH3 to the egg, central cell, or pollen of a plant. For example, AT-DD45 PRO, AT-RKD1 PRO or AT-RKD2 PRO can be used as egg cell-specific promoters. The egg and central cell-specific MEA (FIS1) and FIS2 promoters are also useful reproductive tissue-specific promoters (Luo, et al., (2000) Proc. Natl. Acad. Sci. USA 97:10637-10642; Vielle-Calzada, et al., (1999) Genes Dev. 13:2971-2982). Other examples of egg cell and central cell-specific promoters can be found, for example, in Steffen, et al., (2007) Plant J 51:281-292 and Ohnishi, et al., (2011) Plant Physiology 155: 881-891, herein incorporated by reference in their entirety. For example, central cell specific promoters from Steffen, et al., can be used, including, for example, AT-DD7 PRO, AT-DD9 PRO, AT-DD22 PRO, AT-DD25 PRO, AT-DD36 PRO, AT-DD41 PRO, AT-DD66 PRO and AT-DD65 PRO.

[0100] Ovule-specific promoters are known and can be selected for ovule-specific expression of polynucleotides disclosed elsewhere herein. For example, ovule-specific promoters can drive expression of transactivators or active CENH3 mutants in the entire ovule, including, but not limited to the egg cell and central cell. The ovule-specific promoter for BEL1 gene can also be used (Reiser, et al., (1995) Cell 83:735-742 GenBank Number U39944; Ray, et al., (1994) Proc. Natl. Acad. Sci. USA 91:5761-5765) as well as those disclosed in U.S. patent application Ser. No. 12/912,231, filed Oct. 26, 2010 herein incorporated by reference in its entirety.

[0101] Possible promoters also include the Black Cherry promoter for Prunasin Hydrolase (PH DL1.4 PRO) (U.S. Pat. No. 6,797, 859), Thioredoxin H promoter from cucumber and rice (Fukuda, et al., (2005). Plant Cell Physiol. 46(11):1779-86), Rice (RSs1) (Shi, et al., (1994). J. Exp. Bot. 45(274):623-631) and maize sucrose synthese -1 promoters (Yang, et al., (1990) PNAS 87:4144-4148), PP2 promoter from pumpkin Guo, et al., (2004) Transgenic Research 13:559-566), At SUC2 promoter (Truernit, et al., (1995) Planta 196(3):564-70., At SAM-1 (S-adenosylmethionine synthetase) (Mijnsbrugge, et al., (1996) Planr. Cell. Physiol. 37(8): 1108-1115) and the Rice tungro bacilliform virus (RTBV) promoter (Bhattacharyya-Pakrasi, et al., (1993) Plant J. 4(1):71-79).

[0102] The expression cassette can also comprise a selectable marker gene for the selection of transformed cells. Selectable marker genes are utilized for the selection of transformed cells or tissues. Marker genes include genes encoding antibiotic resistance, such as those encoding neomycin phosphotransferase II (NEO) and hygromycin phosphotransferase (HPT), as well as genes conferring resistance to herbicidal compounds, such as glufosinate ammonium, bromoxynil, imidazolinones and 2,4-dichlorophenoxyacetate (2,4-D). Additional selectable markers include phenotypic markers such as β-galactosidase and fluorescent proteins such as green fluorescent protein (GFP) (Su, et al., (2004) Biotechnol Bioeng 85:610-9 and Fetter, et al., (2004) Plant Cell 16:215-28), cyan florescent protein (CYP) (Bolte, et al., (2004) J. Cell Science 117:943-54 and Kato, et al., (2002) Plant Physiol 129:913-42) and yellow florescent protein (PhiYFP™ from Evrogen, see, Bolte, et al., (2004) J. Cell Science 117:943-54). For additional selectable markers, see generally, Yarranton, (1992) Curr. Opin. Biotech. 3:506-511; Christopherson, et al., (1992) Proc. Natl. Acad. Sci. USA 89:6314-6318; Yao, et al., (1992) Cell 71:63-72; Reznikoff, (1992) Mol. Microbiol. 6:2419-2422; Barkley, et al., (1980) in The Operon, pp. 177-220; Hu, et al., (1987) Cell 48:555-566; Brown, et al., (1987) Cell 49:603-612; Figge, et al., (1988) Cell 52:713-722; Deuschle, et al., (1989) Proc. Natl. Acad. Sci. USA 86:5400-5404; Fuerst, et al., (1989) Proc. Natl. Acad. Sci. USA 86:2549-2553; Deuschle, et al., (1990) Science 248:480-483; Gossen, (1993) Ph.D. Thesis, University of Heidelberg; Reines, et al., (1993) Proc. Natl. Acad. Sci. USA 90:1917-1921; Labow, et al., (1990) Mol. Cell. Biol. 10:3343-3356; Zambretti, et al., (1992) Proc. Natl. Acad. Sci. USA 89:3952-3956; Bairn, et al., (1991) Proc. Natl. Acad. Sci. USA 88:5072-5076; Wyborski, et al., (1991) Nucleic Acids Res. 19:4647-4653; Hillenand-Wissman, (1989) Topics Mol. Struc. Biol. 10:143-162; Degenkolb, et al., (1991) Antimicrob. Agents Chemother. 35:1591-1595; Kleinschnidt, et al., (1988) Biochemistry 27:1094-1104; Bonin, (1993) Ph.D. Thesis, University of Heidelberg; Gossen, et al., (1992) Proc. Natl. Acad. Sci. USA 89:5547-5551; Oliva, et al., (1992) Antimicrob. Agents Chemother. 36:913-919; Hlavka, et al., (1985) Handbook of Experimental Pharmacology, Vol. 78 (Springer-Verlag, Berlin); Gill, et al., (1988) Nature 334:721-724. Such disclosures are herein incorporated by reference. The above list of selectable marker genes is not meant to be limiting. Any selectable marker gene can be used in the present invention.

[0103] D. Fragments and Variants

[0104] The expression and suppression cassettes of the invention can be designed based on the naturally occurring CENH3, Spo11-1, Rec8 or Osd1 polynucleotides or fragments or variants thereof. By “fragment” is intended a portion of the nucleotide sequence. Fragments of the disclosed nucleotide sequences may range from at least about 10, 16, 20, 50, 75, 100, 150, 200, 250, 300, 350, 400, 450 or 500 contiguous nucleotides, or up to the number of nucleotides present in a full-length CENH3, Spo11-1, Rec8 or Osd1 polynucleotide disclosed herein (for example, 1089 nucleotides for SEQ ID NO: 2) so long as the fragment achieves the desired objective, i.e., expression of a biologically active polypeptide of interest (for example, the active CENH3 mutant or CENH3 polypeptide) or expression of a functional silencing element that suppresses expression or function of the CENH3, Spo11-1, Rec8 or Osd1 polypeptide.

[0105] By “variants” is intended to mean substantially similar sequences. For polynucleotides, a variant comprises a deletion and/or addition of one or more nucleotides at one or more internal sites within the native polynucleotide and/or a substitution of one or more nucleotides at one or more sites in the native polynucleotide. As used herein, a “native” polynucleotide comprises a naturally occurring nucleotide sequence, for example, a naturally occurring CENH3, Spo11-1, Rec8 or Osd1 polynucleotide. For polynucleotides, naturally occurring variants can be identified with the use of well-known molecular biology techniques such as, for example, polymerase chain reaction (PCR) and hybridization techniques as outlined elsewhere herein. Variant polynucleotides also include synthetically derived polynucleotides, such as those generated, for example, by using site-directed mutagenesis. Generally, variants of a particular polynucleotide of the invention will have at least about 40%, 45%, 50%, 55%, 60%, 65%, 70%, 75%, 80%, 85%, 90%, 91%, 92%, 93%, 94%, 95%, 96%, 97%, 98%, 99% or more sequence identity to that particular polynucleotide as determined by sequence alignment programs and parameters commonly known in the art.

[0106] In particular embodiments, a silencing element of the invention may comprise the full-length nucleotide sequence of SEQ ID NOS: 2, 3, 4 and/or 5 or a fragment of the nucleotide sequence of SEQ ID NOS: 2, 3, 4 and/or 5. Additionally, silencing elements of the invention may comprise a variant of the full-length nucleotide sequence of SEQ ID NOS: 2, 3, 4 and/or 5 or a variant of a fragment of the nucleotide sequence of SEQ ID NOS: 2, 3, 4 and/or 5. Such variants will maintain at least 80% sequence identity to the nucleotide sequence of the native full-length sequence or fragment from which the variant is derived. It is recognized that the CENH3 and active CENH3 mutants can be altered in various ways including amino acid substitutions, deletions, truncations and insertions. Methods for such manipulations are generally known in the art. Nucleotide sequence variants and fragments of the CENH3, Spo11-1, Rec8 or Osd1 gene can be prepared by mutations in the DNA. Methods for mutagenesis and polynucleotide alterations are well known in the art. See, for example, Kunkel, (1985) Proc. Natl. Acad. Sci. USA 82:488-492; Kunkel, et al., (1987) Methods in Enzymol. 154:367-382; U.S. Pat. No. 4,873,192; Walker and Gaastra, eds. (1983) Techniques in Molecular Biology (MacMillan Publishing Company, New York) and the references cited therein.

[0107] Thus, the expression and suppression cassettes can be based on the naturally occurring nucleotide sequences as well as variations and modified forms thereof. Such variants will continue to possess the desired activity. Obviously, where a functional polypeptide is to be expressed, the mutations that will be made in the DNA encoding the variant polypeptide must not place the sequence out of reading frame and optimally will not create complementary regions that could produce secondary mRNA structure. See, EP Patent Application Publication Number 75,444.

[0108] The deletions, insertions and substitutions of the encoded polypeptides encompassed herein are not expected to produce radical changes in the characteristics of the protein. However, when it is difficult to predict the exact effect of the substitution, deletion or insertion in advance of doing so, one skilled in the art will appreciate that the effect will be evaluated by routine screening assays. Deletions, insertions and substitutions within a polynucleotide of interest are made such that the variant polynucleotide retains the desired activity, i.e., encoding a functional CENH3 variant or encoding a functional silencing element that effectively suppresses expression or function of the CENH3, Spo11-1, Rec8 or Osd1 polypeptide. In an inbred situation, analyses of protein functionality would be best done through cytogenetic evaluations, i.e., microscopy of meiotic stages and resultant products. Mis-function of these proteins would have impacts on fertility and offspring health (across reasonable numbers of plants) which would be in most cases readily noticed. In crosses between differing genetic backgrounds, molecular markers could be used to assess recombination and segregation.

### III. Plants

[0109] Plants, plant cells, plant parts and seeds and grain comprising one or more of the expression cassettes and suppression cassettes described elsewhere herein are provided. In specific embodiments, the plants and/or plant parts comprise stably incorporated in the genome at least one transactivator expression cassette, at least one active CENH3 mutant expression cassette, at least one wild-type CENH3 expression cassette, at least one MiMe suppression cassette and/or at least one wild-type CENH3 suppression cassette. Thus, the invention provides plants, plant cells, plant parts and seed that have stably incorporated into their genome a transactivator A expression cassette, an active CENH3 mutant expression cassette and a MiMe suppression cassette. Further provided are plants, plant cells, plant parts and seeds that have stably incorporated into their genome a transactivator B expression cassette, a wild-type CENH3 expression cassette, and a wild-type CENH3 suppression cassette. In specific embodiments, progeny plants are provided resulting from the cross of a plant having stably incorporated into the genome a transactivator A expression cassette, an active CENH3 mutant expression cassette and a MiMe suppression cassette with a plant having stably incorporated into the genome a transactivator B expression cassette, a wild-type CENH3 expression cassette and a wild-type CENH3 suppression cassette wherein the progeny plant is a self-reproducing hybrid plant. Such self-reproducing hybrid progeny plants comprise at least one transactivator expression cassette, at least one active CENH3 mutant expression cassette, at least one wild-type CENH3 expression cassette, at least one MiMe suppression cassette and/or at least one wild-type CENH3 suppression cassette.

[0110] In specific embodiments, plants and seeds are provided comprising a suppression cassette comprising a MiMe silencing element operably linked to a transactivator B-inducible promoter, an expression cassette comprising a polynucleotide encoding an active CENH3 mutant operably linked to an ovule-specific promoter, and an expression cassette comprising a polynucleotide encoding a transactivator A operably linked to an ovule-specific promoter. In other embodiments, plants and seeds are provided comprising a suppression cassette comprising a wild-type CENH3 silencing element operably linked to a transactivator A-inducible promoter, an expression cassette comprising a polynucleotide encoding a wild-type CENH3 polypeptide operably linked to a central-cell specific promoter and an expression cassette comprising a polynucleotide encoding a transactivator B operably linked to a promoter.

[0111] As used herein, the term plant includes plant cells, plant protoplasts, plant cell tissue cultures from which plants can be regenerated, plant calli, plant clumps and plant cells that are intact in plants or parts of plants such as embryos, pollen, ovules, seeds, leaves, flowers, branches, fruit, kernels, ears, cobs, husks, stalks, roots, root tips, anthers and the like. Grain is intended to mean the mature seed produced by commercial growers for purposes other than growing or reproducing the species. Progeny, variants and mutants of the regenerated plants are also included within the scope of the invention, provided that these parts comprise the introduced polynucleotides.

[0112] The expression cassettes and suppression cassettes disclosed herein may be used for transformation of any plant species, including, but not limited to, monocots and dicots. Examples of plant species of interest include, but are not limited to, corn (Zea mays), Brassica sp. (e.g., B. napus, B. rapa, B. juncea), particularly those Brassica species useful as sources of seed oil, alfalfa (Medicago sativa), rice (Oryza sativa), rye (Secale cereale), sorghum (Sorghum bicolor, Sorghum vulgare), millet (e.g., pearl millet (Pennisetum glaucum), proso millet (Panicum miliaceum), foxtail millet (Setaria italica), finger millet (Eleusine coracana)), sunflower (Helianthus annuus), safflower (Carthamus tinctorius), wheat (Triticum aestivum), soybean (Glycine max), tobacco (Nicotiana tabacum), potato (Solanum tuberosum), peanuts (Arachis hypogaea), cotton (Gossypium barbadense, Gossypium hirsutum), sweet potato (Ipomoea batatus), cassava (Manihot esculenta), coffee (Coffee spp.), coconut (Cocos nucifera), pineapple (Ananas comosus), citrus trees (Citrus spp.), cocoa (Theobroma cacao), tea (Camellia sinensis), banana (Musa spp.), avocado (Persea americana), fig (Ficus casica), guava (Psidium guajava), mango (Mangifera indica), olive (Olea europaea), papaya (Carica papaya), cashew (Anacardium occidentale), macadamia (Macadamia integrifolia), almond (Prunus amygdalus), sugar beets (Beta vulgaris), sugarcane (Saccharum spp.), oats, barley, vegetables, ornamentals and conifers.

[0113] Vegetables include tomatoes (Lycopersicon esculentum), lettuce (e.g., Lactuca sativa), green beans (Phaseolus vulgaris), lima beans (Phaseolus limensis), peas (Lathyrus spp.) and members of the genus Cucumis such as cucumber (C. sativus), cantaloupe (C. cantalupensis) and musk melon (C. melo). Ornamentals include azalea (Rhododendron spp.), hydrangea (Macrophylla hydrangea), hibiscus (Hibiscus rosasanensis), roses (Rosa spp.), tulips (Tulipa spp.), daffodils (Narcissus spp.), petunias (Petunia hybrida), carnation (Dianthus caryophyllus), poinsettia (Euphorbia pulcherrima) and chrysanthemum.

[0114] Conifers that may be employed in practicing the present invention include, for example, pines such as loblolly pine (Pinus taeda), slash pine (Pinus elliotii), ponderosa pine (Pinus ponderosa), lodgepole pine (Pinus contorta) and Monterey pine (Pinus radiata); Douglas-fir (Pseudotsuga menziesii); Western hemlock (Tsuga canadensis); Sitka spruce (Picea glauca); redwood (Sequoia sempervirens); true firs such as silver fir (Abies amabilis) and balsam fir (Abies balsamea) and cedars such as Western red cedar (Thuja plicata) and Alaska yellow-cedar (Chamaecyparis nootkatensis) and Poplar and Eucalyptus. In specific embodiments, plants of the present invention are crop plants (for example, corn, alfalfa, sunflower, Brassica, soybean, cotton, safflower, peanut, sorghum, wheat, millet, tobacco, etc.). In other embodiments corn and soybean plants are optimal and in yet other embodiments soybean plants are optimal.

[0115] Other plants of interest include grain plants that provide seeds of interest, oil-seed plants, and leguminous plants. Seeds of interest include grain seeds, such as corn, wheat, barley, rice, sorghum, rye, etc. Oil-seed plants include cotton, soybean, safflower, sunflower, Brassica, maize, alfalfa, palm, coconut, etc. Leguminous plants include beans and peas. Beans include guar, locust bean, fenugreek, soybean, garden beans, cowpea, mungbean, lima bean, fava bean, lentils, chickpea, etc.

[0116] In some embodiments, the polynucleotides comprising the expression cassettes or suppression cassettes described elsewhere herein are engineered into a molecular stack. Thus, the various plants, plant cells and seeds disclosed herein can further comprise one or more traits of interest, and in more specific embodiments, the plant, plant part or plant cell is stacked with any combination of polynucleotide sequences of interest, expression cassettes of interest or suppression cassettes of interest in order to create plants with a desired combination of traits. As used herein, the term “stacked” includes having the multiple traits present in the same plant.

[0117] These stacked combinations can be created by any method including, but not limited to, breeding plants by any conventional methodology or genetic transformation. If the sequences are stacked by genetically transforming the plants, the polynucleotide sequences of interest can be combined at any time and in any order. The traits can be introduced simultaneously in a co-transformation protocol with the polynucleotides of interest provided by any combination of transformation cassettes. For example, if two sequences will be introduced, the two sequences can be contained in separate transformation cassettes (trans) or contained on the same transformation cassette (cis). Expression of the sequences can be driven by the same promoter or by different promoters. In certain cases, it may be desirable to introduce a transformation cassette that will suppress the expression of the polynucleotide of interest. This may be combined with any combination of other suppression cassettes or overexpression cassettes to generate the desired combination of traits in the plant. It is further recognized that polynucleotide sequences can be stacked at a desired genomic location using a site-specific recombination system. See, for example, WO 1999/25821, WO 1999/25854, WO 1999/25840, WO 1999/25855 and WO 1999/25853, all of which are herein incorporated by reference.

[0118] Thus, in specific embodiments, the expression cassettes and suppression cassettes disclosed herein function to produce self-reproducing hybrid progeny plants when combined in a progeny plant. Such expression and suppression cassettes can then be stacked with any other sequence of interest, including polynucleotides conferring herbicide tolerance. Non-limiting examples of such sequences are disclosed elsewhere herein.

[0119] A “subject plant or plant cell” is one in which genetic alteration, such as transformation, has been affected as to a polynucleotide of interest, or is a plant or plant cell which is descended from a plant or cell so altered and which comprises the alteration. A “control” or “control plant” or “control plant cell” provides a reference point for measuring changes in phenotype of the subject plant or plant cell. A control plant or plant cell may comprise, for example: (a) a wild-type plant or cell, i.e., of the same genotype as the starting material for the genetic alteration which resulted in the subject plant or cell; (b) a plant or plant cell of the same genotype as the starting material but which has been transformed with a null construct (i.e., with a construct which has no known effect on the trait of interest, such as a construct comprising a marker gene); (c) a plant or plant cell which is a non-transformed segregant among progeny of a subject plant or plant cell; (d) a plant or plant cell genetically identical to the subject plant or plant cell but which is not exposed to conditions or stimuli that would induce expression of the gene of interest; or (e) the subject plant or plant cell itself, under conditions in which the gene of interest is not expressed.

[0120] The methods of the invention comprise introducing expression and suppression cassettes disclosed herein into the genome of a plant or plant cell. The methods provided herein do not depend on a particular method for introducing polynucleotides comprising the expression or suppression cassettes into the host cell, only that the polynucleotide gains access to the interior of at least one cell of the host. Methods for introducing polynucleotides into host cells (i.e., plants) are known in the art and include, but are not limited to, stable transformation methods, transient transformation methods and virus-mediated methods.

[0121] “Stable transformation” is intended to mean that the nucleotide construct introduced into a host (i.e., a plant) integrates into the genome of the plant and is capable of being inherited by the progeny thereof. “Transient transformation” is intended to mean that a polynucleotide is introduced into the host (i.e., a plant) and expressed temporally.

[0122] Transformation protocols as well as protocols for introducing polynucleotide sequences into plants may vary depending on the type of plant or plant cell, i.e., monocot or dicot, targeted for transformation. Suitable methods of introducing polynucleotides into plant cells include microinjection (Crossway, et al., (1986) Biotechniques 4:320-334), electroporation (Riggs, et al., (1986) Proc. Natl. Acad. Sci. USA 83:5602-5606, Agrobacterium-mediated transformation (Townsend, et al., U.S. Pat. No. 5,563,055; Zhao, et al., U/S/ Pat. No. 5,981,840), direct gene transfer (Paszkowski, et al., (1984) EMBO J. 3:2717-2722) and ballistic particle acceleration (see, for example, Sanford, et al., U.S. Pat. No. 4,945,050; Tomes, et al., U.S. Pat. No. 5,879,918; Tomes, et al., U.S. Pat. No. 5,886,244; Bidney, et al., U.S. Pat. No. 5,932,782; Tomes, et al., (1995) “Direct DNA Transfer into Intact Plant Cells via Microprojectile Bombardment,” in Plant Cell, Tissue, and Organ Culture: Fundamental Methods, ed. Gamborg and Phillips, (Springer-Verlag, Berlin); McCabe, et al., (1988) Biotechnology 6:923-926) and Led transformation (WO 2000/28058). Also see, Weissinger, et al., (1988) Ann. Rev. Genet. 22:421-477; Sanford, et al., (1987) Particulate Science and Technology 5:27-37 (onion); Christou, et al., (1988) Plant Physiol. 87:671-674 (soybean); McCabe, et al., (1988) Bio/Technology 6:923-926 (soybean); Finer and McMullen, (1991) In Vitro Cell Dev. Biol. 27P:175-182 (soybean); Singh, et al., (1998) Theor. Appl. Genet. 96:319-324 (soybean); Datta, et al., (1990) Biotechnology 8:736-740 (rice); Klein, et al., (1988) Proc. Natl. Acad. Sci. USA 85:4305-4309 (maize); Klein, et al., (1988) Biotechnology 6:559-563 (maize); Tomes, U.S. Pat. No. 5,240,855; Buising, et al., U.S. Pat. Nos. 5,322,783 and 5,324,646; Tomes, et al., (1995) “Direct DNA Transfer into Intact Plant Cells via Microprojectile Bombardment,” in Plant Cell, Tissue, and Organ Culture: Fundamental Methods, ed. Gamborg (Springer-Verlag, Berlin) (maize); Klein, et al., (1988) Plant Physiol. 91:440-444 (maize); Fromm, et al., (1990) Biotechnology 8:833-839 (maize); Hooykaas-Van Slogteren, et al., (1984) Nature (London) 311:763-764; Bowen, et al., U.S. Pat. No. 5,736,369 (cereals); Bytebier, et al., (1987) Proc. Natl. Acad. Sci. USA 84:5345-5349 (Liliaceae); De Wet, et al., (1985) in The Experimental Manipulation of Ovule Tissues, ed. Chapman, et al., (Longman, N.Y.), pp. 197-209 (pollen); Kaeppler, et al., (1990) Plant Cell Reports 9:415-418 and Kaeppler, et al., (1992) Theor. Appl. Genet. 84:560-566 (whisker-mediated transformation); D′Halluin, et al., (1992) Plant Cell 4:1495-1505 (electroporation); Li, et al., (1993) Plant Cell Reports 12:250-255 and Christou and Ford, (1995) Annals of Botany 75:407-413 (rice); Osjoda, et al., (1996) Nature Biotechnology 14:745-750 (maize via Agrobacterium tumefaciens), all of which are herein incorporated by reference.

[0123] In specific embodiments, the expression and suppression cassettes disclosed herein can be provided to a plant using a variety of transient transformation methods. Such transient transformation methods include, but are not limited to, the introduction of the expression and suppression cassettes directly into the plant. Such methods include, for example, microinjection or particle bombardment. See, for example, Crossway, et al., (1986) Mol Gen. Genet. 202:179-185; Nomura, et al., (1986) Plant Sci. 44:53-58; Hepler, et al., (1994) Proc. Natl. Acad. Sci. 91: 2176-2180 and Hush, et al., (1994) The Journal of Cell Science 107:775-784, all of which are herein incorporated by reference.

[0124] Alternatively, expression and suppression cassettes can be transiently transformed into the plant using techniques known in the art. Such techniques include viral vector system and the precipitation of the polynucleotide in a manner that precludes subsequent release of the DNA. Thus, the transcription from the particle-bound DNA can occur, but the frequency with which it is released to become integrated into the genome is greatly reduced. Such methods include the use particles coated with polyethylimine (PEI; Sigma #P3143).

[0125] In other embodiments, expression and suppression cassettes disclosed herein may be introduced into plants by contacting plants with a virus or viral nucleic acids. Generally, such methods involve incorporating a nucleotide construct of the invention within a viral DNA or RNA molecule. Methods for introducing polynucleotides into plants and expressing a protein encoded therein, involving viral DNA or RNA molecules, are known in the art. See, for example, U.S. Pat. Nos. 5,889,191, 5,889,190, 5,866,785, 5,589,367, 5,316,931 and Porta, et al., (1996) Molecular Biotechnology 5:209-221; herein incorporated by reference.

[0126] Methods are known in the art for the targeted insertion of a polynucleotide at a specific location in the plant genome. In one embodiment, the insertion of the polynucleotide at a desired genomic location is achieved using a site-specific recombination system. See, for example, WO 1999/25821, WO 1999/25854, WO 1999/25840, WO 1999/25855 and WO 1999/25853, all of which are herein incorporated by reference. Briefly, the polynucleotide of the invention can be contained in transfer cassette flanked by two non-identical recombination sites. The transfer cassette is introduced into a plant having stably incorporated into its genome a target site which is flanked by two non-identical recombination sites that correspond to the sites of the transfer cassette. An appropriate recombinase is provided and the transfer cassette is integrated at the target site. The polynucleotide of interest is thereby integrated at a specific chromosomal position in the plant genome.

[0127] The cells that have been transformed may be grown into plants in accordance with conventional ways. See, for example, McCormick, et al., (1986) Plant Cell Reports 5:81-84. These plants may then be grown and either pollinated with the same transformed strain or different strains and the resulting progeny having constitutive expression of the desired phenotypic characteristic identified. Two or more generations may be grown to ensure that expression of the desired phenotypic characteristic is stably maintained and inherited and then seeds harvested to ensure expression of the desired phenotypic characteristic has been achieved. In this manner, the present invention provides transformed seed (also referred to as “transgenic seed”) having expression and suppression cassettes disclosed herein, stably incorporated into their genome.

### EXAMPLES

### Example 1

### Plant Material and Growth Conditions

[0128] Plants were grown in artificial soil mix at 20° C. under fluorescent lighting. Wild-type and mutant strains of Arabidopsis were obtained from ABRC, Ohio or NASC, UK. dyad was crossed to the No-0 strain to generate populations that were heterozygous for markers across the genome. MiMe plants were a mixture of Col-0 from Atspo11-1-3/Atrec8-3 and No-0 from osd1-1 (S1). The GEM plants used in this study are F1 progeny obtained by crossing cenh3-1/cenh3-1 GFP-tailswap/GFP-tailswap (female) to cenh3-1/cenh3-1 GFPCENH3/GFP-CENH3 (male).

[0129] cenh3-1 was isolated by the TILLING procedure (Comai and Henikoff, (2006) Plant J 45:684-94). The TILLING population was created by mutagenizing Arabidopsis thaliana in the Col-0 accession with ethylmethanesulfonate, using standard protocols. Cenh3-1 was isolated by TILLING using the CEL1 heteroduplex cleavage assay, with PCR primers specific for the CENH3/HTR12 gene. Cloning of the GFP-CENH3 and GFP-tailswap transgenes and construction of the complemented cenh3-1 GFP-CENH3 and cenh3-1 GFP-tailswap lines are described elsewhere herein (Ravi, et al, manuscript in preparation).

[0130] To cross wild-type as the female to GFP-tailswap as the male, a dissecting microscope was used to directly observe pollen deposition on the stigma (GFP-tailswap is mostly male-sterile). The amount of viable pollen in individual flowers of GFP-tailswap varies. Flowers that clearly showed higher amounts of pollen were selected and pollinated with more than 60 anthers (10 GFP-tailswap flowers) per wild-type stigma to achieve the seed set reported in Table 1. Using an optivisor (magnifying lens) and approximately 12 anthers (2 GFP-tailswap flowers) per wild-type stigma, a much lower seed set per silique was obtained. Seed from GFP-tailswap X wild-type crosses were sown on 1 X MS plates containing 1% sucrose to maximize germination efficiency, particularly of seed that had an abnormal appearance. Late germinating seeds were frequently haploid.

[0131] A chimera was created in which the A. thaliana CENH3 tail from CENH3 is replaced with the CENH3 tail domain from maize (Zea mays), thereby generating a fusion of the maize CENH3 tail and A. thaliana CENH3 histone-fold domain and transformed the fusion into cenh3-1 heterozygotes. As expected, this GFP-maize tailswap protein was targeted to kinetochores and rescued the embryo-lethal phenotype of cenh3-1.

### Example 2

### Genotyping and Microsatellite Marker Analysis

[0132] Primers for osd1-1, Atspo11-1-3 and Atrec8-3 (MiMe) genotyping are described (S1). Microsatellite markers were analyzed. Primer sequences were obtained from TAIR (www.Arabidopsis.org) or from the MSAT database (INRA). cenh3-1: a point mutation G161A in the CENH3 gene (also known as, HTR12) detected with dCAPS primers (dCAPs restriction polymorphism with EcoRV, the wild-type allele cuts):

| (SEQ ID NO: 6) | |
|---|---|
| Primer 1: | GGTGCGATTTCTCCAGCAGTAAAAATC |
| (SEQ ID NO: 7) | |
| Primer 2: | CTGAGAAGATGAAGCACCGGCGATAT |

[0133] Detection of GFP-tailswap insertion on chromosome 1:

| Primer 1 for wild-type and T-DNA: | |
|---|---|
| CACATACTCGCTACTGGTCAGAGAATC | (SEQ ID NO: 8) |
| Primer 2 for wild-type only: | |
| CTGAAGCTGAACCTTCGTCTCG | (SEQ ID NO: 9) |
| Primer 3 for the T-DNA: | |
| AATCCAGATCCCCCGAATTA | (SEQ ID NO: 10) |

[0134] Primers for detection of GFP-CENH3:

| | |
|---|---|
| CAGCAGAACACCCCCATC | (SEQ ID NO: 11) |
| (in GFP) | |
| CTGAGAAGATGAAGCACCGGCGATAT | (SEQ ID NO: 12) |
| (in CENH3) | |

### Ploidy Analysis

[0135] MiMe and osd1 offspring ploidy analyses were performed by flow cytometry and systemically confirmed by chromosome spreads. For dyad offspring, ploidy analysis was by flow cytometry and randomly selected diploid eliminants (n=5) were further confirmed by FISH analysis using a centromere repeat probe to count chromosomes and all were found to be diploids. Isolation of nuclei for flow cytometry was performed. Flow cytometry analysis was carried out using an internal diploid and tetraploid control to unambiguously identify diploid plants.

[0136] In elimination crosses to the wild-type tetraploid line (C24 background), triploids were identified as late flowering (due to combination of the Col-0 FRIGIDA and C24 FLOWERING LOCUS C alleles). The aneuploid plants show distinct morphological phenotypes such as altered vegetative growth, variation in rosette leaf morphology (size and shape), a range of leaf color (pale yellow to dark green) and thus can be easily distinguished from normal diploid wild-type plants. Further, aneuploid plants show varied flowering time and mostly have reduced fertility and seed set. Putative diploids were genotyped for at least one marker per chromosome (Chr 1: F511, CIW12; Chr 2: MSAT2.11; Chr 3: MSAT3.19, CIW11; Chr 4: nga8; Chr 5: CTR1.2, nga106). Eliminants were identified as having only C24 alleles, in addition to lacking GFP fluorescence at the centromeres which is present in the GEM line. Random diploid plants (n=8) were further confirmed by karyotyping in meiotic chromosome spreads and all were found to be diploids.

[0137] The article “a” and “an” are used herein to refer to one or more than one (i.e., to at least one) of the grammatical object of the article. By way of example, “an element” means one or more element.

[0138] All publications and patent applications mentioned in the specification are indicative of the level of those skilled in the art to which this invention pertains. All publications and patent applications are herein incorporated by reference to the same extent as if each individual publication or patent application was specifically and individually indicated to be incorporated by reference.

[0139] Although the foregoing invention has been described in some detail by way of illustration and example for purposes of clarity of understanding, it will be obvious that certain changes and modifications may be practiced within the scope of the appended claims.

The application's sequence listing, which the Patent Office published only in electronic form, follows.

SEQUENCE LISTING (274 sequences)

SEQ ID NO: 1 - protein, 16 aa, artificial sequence
  primer
PRGLYTHRVALALALE

SEQ ID NO: 2 - DNA, 1089 bp, Arabidopsis thaliana
atggagggaaaattcgctatttcagaatcgactaatttgcttcaaaggatcaaagattttactcaatcggtcgttgtagatctggctgaaggaagatctccaaaaatttccatcaatcaattcaggaactattgcatgaatccagaagctgattgcttatgcagctctgataaaccaaagggtcaggaaattttcactcttaagaaggaaccacaaacctacagaatcgatatgttgctaagagtattgttgatagtccaacaacttctgcaagaaaatagacatgcttcgaaaagagatatctactacatgcatccatcagctttcaaagcacaatccattgtggaccgtgcaattggtgatatatgcattctttttcagtgtagtcggtacaacttgaatgtggtttctgttggaaacgggttggtgatgggttggttaaaatttagggaagctggaaggaaatttgattgtttaaacagcttgaacactgcatatcccgttcctgttcttgtagaggaagtcgaagatattgttagcttagctgagtacatactggttgtggaaaaagaaacagtattccagcgtttagcaaatgacatgttttgcaagacgaaccgctgcattgttatcacaggaagaggatatccagatgtctcaacaagaaggttcttgcgactcctgatggagaagttgcatctacctgtgcattgtctagtcgactgtgatccatatggctttgagatcctagccacataccgttttggctccatgcaaatggcctatgatattgaatcattacgagcaccagatatgaaatggttgggagcttttccttcagactctgaggtatatagtgttcccaaacagtgtcttttgccactgacagaagaagataagaaaagaactgaagcaatgttgcttagatgctacctgaagcgtgaaatgccacaatggaggttggaacttgaaacgatgttgaaaagaggggtcaagtttgagatcgaagcactctcagttcactcactgtcctttttgtcagaggtatatattccttctaagattcgtcgtgaagtaagctctccttga

SEQ ID NO: 3 - DNA, 1279 bp, Arabidopsis thaliana
cactctccccaagaaagctctcttctctctctcactctctctctctcattgtctctctacacagttttggagtttatcaatagctttattgaagattcaaagcgacgttatcaaaatgccagaagcaagagatcgaaccgagaggcctgtggattactcgactatatttgccaaccgacggagacatggtattttacttgacgagccagattcacggcttagtttgattgaatctccggtgaatccagatattgggtctattggtggaacgggcgggcttgtgagaggcaatttcactacatggaggcctggtaatggcagaggtggtcacactccatttagattgccacagggaagagagaatatgcccatagtgaccgctaggcgtggaagaggtggtggtttgttgccttcttggtatccaagaacacctctacgcgacataactcatattgtgcgggctattgagagaagaagaggagctgggactggaggagacgatggccgagttattgagatcccaactcatcgacaagttggtgttcttgaatctccagtaccactgtcaggagaacacaaatgctcgatggtcactcctggaccatctgtgggattcaagcgtagttgcccaccatcaactgctaaagttcaaaagatgttacttgacatcactaaagagatagctgaggaagaagctggcttcatcacacccgagaagaagctactcaattctattgacaaagttgagaaaattgtgatggcggagatccagaagttgaagagcactcctcaagctaaaagggaagagcgggagaagagggtgcggactttaatgactatgcgatgatctttacttaggagaagagaccagatgcgatgatccttacttaggagaagagaccatagaggtatatctgcttaaaggttcctgcacagtgagtacatcatcttcttatgatatcatagatggatctacaggtcatcctctaatgacatatcttcacaagttcggtggtttcttagacttgtatcattttctgatgattttattagaagcgtcaatcatcttttgacgattttataggatactcgttttggaaaatcattgttctgatgatagaatagatcaggaatcatctgctgatgatgatatcataggaaagattataatagttcacacatttcatatctgaagtgtcatcacttgtagacgattttggcttgttgttgactttcaataattgagttgtatataagtattgaatgtttggttttattg

SEQ ID NO: 4 - DNA, 2093 bp, Arabidopsis thaliana
aacttcaatggagactggagagagagaagggacgtaattaaacaccaaagcgtttttatatttcggagaatcaactacgtgtcgtttgacatcctaaattggcagatagtagaaaggaaatgttgagactggagagtttgatagtaacagtgtggggaccagcgacgcttctagctcgaaaagctccgttgggtcagatatggatggccgctacattgcacgcgaagatcaaccggaagaaactagataagctcgatatcattcaaatctgcgaagagattttgaatccgtcggttccgatggctcttagactctccgggattcttatgggtggtgttgtgattgtttatgagaggaaagtgaagctcctattcgatgatgttaatcgctttctggttgaaattaatggagcttggcgcacaaaatctgttccggatcccactttactacctaaaggaaaaacccatgccaggaaagaggctgttacattgcctgagaacgaagaagctgattttggagattttgaacagactcgtaatgttcctaaatttggcaattacatggattttcagcagacttttatttccatgcggttagatgaatcccatgttaacaataaccccgagccagaagatcttggacagcagttccatcaagctgatgccgagaatatcacactctttgagtatcatggttcattccagaccaacaatgaaacatatgatcgttttgaaagatttgacatcgaaggagatgatgaaacacagatgaactccaatccaagagaaggcgctgaaatacctacaactctcatcccatcaccacctcgtcatcatgacattcccgaaggagtcaaccccacaagccctcagcgccaggagcaacaggagaatcgtagggacggatttgctgagcagatggaggaacaaaacataccggacaaagaggaacacgatagaccacaaccagcgaaaaagagagcaagaaagacagctacttcagcgatggattatgagcaaactattatcgctggtcatgtttaccagtcatggctccaggatacttctgacattctctgtaggggggaaaagagaaaggttcgaggaactatccggccagacatggaaagtttcaaacgtgcgaatatgccacctacacaactctttgaaaaggacagttcttacccgcctcagctttaccagctttggtcaaagaatactcaagttcttcaaacctcatcatctgaatctcgacatcctgatctccgtgcggaacaatctccagggtttgttcaggagagaatgcataaccaccatcaaacagaccatcatgagcgcagtgacacaagctcccaaaatcttgatagtcccgcagaaatactccggacagttcgtactgggaaaggtgcttcagtagaaagcatgatggctggatctcgagcaagccctgaaactattaaccgccaggctgctgatattaatgtcacgccattctattctggagatgatgtgagatccatgcctagtacaccatccgcacgtggagcagcttcaattaacaacatagagatcagctctaaaagtcgcatgcccaatagaaaaagaccaaattcctcaccaagaagaggactcgaaccagtggcggaagagagaccgtgggagcaccgtgaatatgagtttgagttttcaatgttacctgaaaaacgcttcacagccgataaagaaatactatttgaaactgcatctacacagactcaaaagccagtgtgcaatcaatcagacgagatgataacagatagcatcaaaagtcacctgaagacacactttgaaacacctggagctcctcaagtggaatctcttaacaagctcgctgttggaatggacagaaacgctgcagctaaactcttcttccaatcctgtgtgttagctactcgcggagtcatcaaggtaaaccaagcagagccttatggggacattctcattgcaagaggacccaacatgtaaggtttgatttctaaattataaaagattctggtgaaccgattatccatagttgttttgcttttcatattctagcagagagagttcgtagac

SEQ ID NO: 5 - DNA, 909 bp, Arabidopsis thaliana
aaattgtgaagcagattcgattttaaaatcaaaatttgagtgtcgagcgggaaagtaaaagttccgctccaatcttctaatcttttcgtatctagcgggaaatttctcagcagtaaaaatcaatggcgagaaccaagcatcgcgttaccaggtcacaacctcggaatcaaactgatgccgccggtgcttcatcttctcaggcggcaggtccaactacgaccccgacaaggagaggcggtgaaggtggagataatactcaacaaacaaatcctacaacttcaccagctactggtacaaggagaggggctaagagatccagacaggctatgccacgaggctcacagaagaagtcttatcgatacaggccaggaaccgttgctctaaaagagattcgccatttccagaagcagacaaaccttcttattccggctgccagtttcataagagaagtgagaagtataacccatatgttggcccctccccaaatcaatcgttggacagctgaagctcttgttgctcttcaagaggcggcagaagattacttggttggtttgttctcagattcaatgctctgtgctatccatgcaagacgtgttactctaatgagaaaagactttgaacttgcacgccggcttggaggaaaaggcagaccatggtgatagaaaactcactcactattcacatctcttacattgtaagtgaggatcgaatagttaacaacaagtgtgtcgtaggttgtataaggttattctctccttgtctcttggtgatgcatgtccttttattttactaaatgatctgaccaaaaccttcttttgaaacataactggaaacccgaatttggtttgattccaatatctaggctgtaaaacttctttctctatgtgtgtttctatctgcttttcgttg

SEQ ID NO: 6 - DNA, 27 bp, Artificial sequence
  primer
ggtgcgatttctccagcagtaaaaatc

SEQ ID NO: 7 - DNA, 26 bp, Artificial sequence
  primer
ctgagaagatgaagcaccggcgatat

SEQ ID NO: 8 - DNA, 27 bp, Artificial sequence
  primer
cacatactcgctactggtcagagaatc

SEQ ID NO: 9 - DNA, 22 bp, Artificial sequence
  primer
ctgaagctgaaccttcgtctcg

SEQ ID NO: 10 - DNA, 20 bp, Artificial sequence
  primer
aatccagatcccccgaatta

SEQ ID NO: 11 - DNA, 18 bp, Artificial sequence
  primer
cagcagaacacccccatc

SEQ ID NO: 12 - DNA, 26 bp, Artificial sequence
  primer
ctgagaagatgaagcaccggcgatat

SEQ ID NO: 13 - DNA, 992 bp, Brassica napus
gggcgtgttaagaagtaggaggaccattcatgcctcttatgagttgtagtctgtgtgtacaaaaaagaagcgttggtgtgaaagaaagcagaaggatttgaaaatcaaaaaaattgaaggagaagcgggaaaacaaataatctctccctccgcttttttttctccaaataatcaatctctcatttcatttgttaacccaagtttttgataattatttcaaaggggtttatttatcttttattcctccggcggcagtaagtagtaatcaatggcgagaaccaaacatttcgcttccagggcacgagatcgcaatcgaactaatgcgactgcttcatcttcggcggcggcggcggaaggtccgagtgcgaccccgacgagaagagaaggcagccaaggagaagctcaacagacagcaactcctactacgactccaccagccggtagaaaaaaaggagggactaagcgaactaaacaagctatgcctaaaagttccaacaagaagaagacattccgttacaagcctggaaccgttgccctcagagagattcgccatttccagaagaccaccaaacttcttatccctgccgctagtttcatccgagaagtgagaagtgtcacccagatctttgcccctcccgatgttacccgttggactgctgaagctcttatggctattcaagaggcggctgaagattttttaattggcttgttctctgatgctatgctttgcgctatccatgcaaggcgtgttactctaatgagaaaagattttgagcttgcacgccgtcttggaggaaaaggcagaccattgtgatcgtttcgcaggttgtataactttgttcactccttatgtcttgtcatttgtgatctgactgacactttcttttgaaacataactgcttgattcaatatctaggctgtaaaacttatccctccttgtttactatcttatatgctttttccttggaattgatagtttccattgtgatttt

SEQ ID NO: 14 - DNA, 726 bp, Brassica rapa
atggcttccttccacatcccacctaaccttgtaggcatcgaaacaagatactgtggatatggagatcattgcaagttcttgcatgaccgtggagattacaaaccgggatggcagatagagaaagagtgggaagaagctgagaaagttaggaagagaaataaagctatgggagttgaagatgatgatgatgctaaaagtgaggaagacgaagatgcattgctatttgcttgtttcatattcagagagccttttgttgatccagttgtcaccaaattgcaagcattacttctggatttatctatcttttacggtgcgattcctccggcggcagtaagtgaaatcaaatcaatggcgagaacgaaacatttcgcttccagggcccgagatcgcaatccaactagttccaacaagaagaagacattccgttacaagcctggaaccgttgccctcagagagattcgccatttccagaagaccaccaaacttcttatccctgccgctagtttcatccgagaagtgagaagtgtcacccagatctttgcccctcccgatgttacccgttggactgctgaagctcttatggctattcaagaggcggctgaagatttcctagttggcctcttctctgatgcgatgctctgcgctatccacgcaagacgtgttactctaatgagaaaagattttgagcttgcacgccgtcttggaggaaaaggcaggccattgtga

SEQ ID NO: 15 - protein, 241 aa, Brassica rapa
MASFHIPPNLVGIETRYCGYGDHCKFLHDRGDYKPGWQIEKEWEEAEKVRKRNKAMGVEDDDDAKSEEDEDALLFACFIFREPFVDPVVTKLQALLLDLSIFYGAIPPAAVSEIKSMARTKHFASRARDRNPTSSNKKKTFRYKPGTVALREIRHFQKTTKLLIPAASFIREVRSVTQIFAPPDVTRWTAEALMAIQEAAEDFLVGLFSDAMLCAIHARRVTLMRKDFELARRLGGKGRPL

SEQ ID NO: 16 - DNA, 621 bp, Glycine max
atggaggcaaaccgcttcattttgaaaattcacaaaccaatagtgaaaagagacagagagggaaaaagaagaagaaaagaaaaagaaaattgcaaaaagcgaaaccgaaaaccaaatccgaagagtgaaggttcgttgaatcccatggcgagagtgaagcacacgccagcttctcgcaaatccgctaaaaagcaagcgccacgcgcatccacttccacgcagccgccaccacaatcccaatcgcctgcaactagagagaggaggagagctcaacaagtggagccgcagcaggagcctgaggctcagggaaggaagaagaggcgcaataggtcgggaactgtggcgcttcgtgagattcggcattttcagaggagttgtgagcttctcatcccggctgctccctttatcagatgtgtcaaacagattacaaatcaattctctacggaggtgtctcgttggacacctgaagctgtggtagcacttcaggaggcagctgaggaatatctggttcacttatttgaagatggaatgctctgtgcaattcatgcaaggcgtattactcttatgaaaaaggacattgagttggcccggaggcttggaggaataggaaggccttggtga

SEQ ID NO: 17 - protein, 206 aa, Glycine max
MEANRFILKIHKPIVKRDREGKRRRKEKENCKKRNRKPNPKSEGSLNPMARVKHTPASRKSAKKQAPRASTSTQPPPQSQSPATRERRRAQQVEPQQEPEAQGRKKRRNRSGTVALREIRHFQRSCELLIPAAPFIRCVKQITNQFSTEVSRWTPEAVVALQEAAEEYLVHLFEDGMLCAIHARRITLMKKDIELARRLGGIGRPW

SEQ ID NO: 18 - DNA, 618 bp, Medicago truncatula
atggcgcgtacaaagcaaactgctcgcaaatccaccggtggcaaggcaccaacgaaggtgctcgccacaaagattgctcgtaattataaaccaaagggaggacttaagagacctcgtcgttttcgtcctggaacagttgctcttcgcgagatacgtaaataccagaagagttccgatcttttgatccgtaagcttccattccagcgtcttgttcgtgaaattgctcatgttgatctcaagccggatttcagattccagagtcatgcggttctcgcacttcaggaagcagcggaagcatatttggttggtttgtttgaggataccaatttgtgtgcaattcatgctaagagggttaccattatgcctaaggatattcaacttgcttgccgtatccgtggtgaacgtcgtgattattggaaaaagatacaaaactgctcatattcttgcgttaatcgtagtttaggagtatttacgagtggcgccgttaattggttgacatatgatgtttcgagtagttctctttgcatgctattgcttcccttgatttggataaagagtcgtatcaaaacatttgccggccatatttggagattgatttcaagaccttatggatgttga

SEQ ID NO: 19 - protein, 205 aa, Medicago truncatula
MARTKQTARKSTGGKAPTKVLATKIARNYKPKGGLKRPRRFRPGTVALREIRKYQKSSDLLIRKLPFQRLVREIAHVDLKPDFRFQSHAVLALQEAAEAYLVGLFEDTNLCAIHAKRVTIMPKDIQLACRIRGERRDYWKKIQNCSYSCVNRSLGVFTSGAVNWLTYDVSSSSLCMLLLPLIWIKSRIKTFAGHIWRLISRPYGC

SEQ ID NO: 20 - DNA, 498 bp, Oryza sativa
atggctcgcacgaagcacccggcggtgaggaagtcgaaggcggagcccaagaagaagctccagttcgaacgctcccctcggccgtcgaaggcgcagcgcgctggtggcggcacgggtacctcggcgaccacgaggagcgcggctggaacatcggcttcagcagggacgcctaggcagcaaacgaagcagaggaagccacaccgcttccgtccaggcacagtggcactgcgggagatcaggaaatttcagaaaaccaccgaactgctgatcccgtttgcaccattttctcggctggtcagggagatcactgatttctattcaaaggatgtgtcacggtggacccttgaagctctccttgcattgcaagaggcagcagaataccacttagtggacatatttgaagtgtcaaatctctgcgccatccatgctaagcgtgttaccatcatgcaaaaggacatgcaacttgccaggcgtatcggtgggcggaggccatggtga

SEQ ID NO: 21 - protein, 165 aa, Oryza sativa
MARTKHPAVRKSKAEPKKKLQFERSPRPSKAQRAGGGTGTSATTRSAAGTSASAGTPRQQTKQRKPHRFRPGTVALREIRKFQKTTELLIPFAPFSRLVREITDFYSKDVSRWTLEALLALQEAAEYHLVDIFEVSNLCAIHAKRVTIMQKDMQLARRIGGRRPW

SEQ ID NO: 22 - DNA, 495 bp, Oryza sativa
atggctcgcacgaagcacccggcggtgaggaagtcgaaggcggagcccaagaagaagctccagttcgaacgctcccctcggccgtcgaaggcgcagcgcgctggtggcggcacgggtacctcggcgaccacgaggagcgcggctggaacatcggcttcagggacgcctaggcagcaaacgaagcagaggaagccacaccgcttccgtccaggcacagtggcactgcgggagatcaggaaatttcagaaaaccaccgaactgctgatcccgtttgcaccattttctcggctggtcagggagatcactgatttctattcaaaggatgtgtcacggtggacccttgaagctctccttgcattgcaagaggcagcagaataccacttagtggacatatttgaagtgtcaaatctctgcgccatccatgctaagcgtgttaccatcatgcaaaaggacatgcaacttgccaggcgtatcggtgggcggaggccatggtga

SEQ ID NO: 23 - protein, 164 aa, Oryza sativa
MARTKHPAVRKSKAEPKKKLQFERSPRPSKAQRAGGGTGTSATTRSAAGTSASGTPRQQTKQRKPHRFRPGTVALREIRKFQKTTELLIPFAPFSRLVREITDFYSKDVSRWTLEALLALQEAAEYHLVDIFEVSNLCAIHAKRVTIMQKDMQLARRIGGRRPW

SEQ ID NO: 24 - DNA, 438 bp, Setaria italic
atggctcgcaccaagcacgcggccgtgaagaaatcgaaggagcagcccaagaagaagctccagttcgcgcgctccccgcaccggagggcgacgccgacaggtacgccggggcggcagcagcagagggtgaagaagccccaccgctggaggccagggacagtagcactgcgagagatcaggaagtaccagaaatccactgagctgcttatcccctttgcgccattcgcccgtctggtgagggagatcactgacttctactcaaagggcaaggtaacgcgctggaccccgcaagcgctccttgcgatgcaagaggcagcagaattccacctgatcgaactgttcgaagtatcaaatctttgtgccatccacgccaaacgtgttactatcatgcaaagggacatacagcttgcaaggcgtatcgggggaaggttttggtga

SEQ ID NO: 25 - protein, 145 aa, Setaria italic
MARTKHAAVKKSKEQPKKKLQFARSPHRRATPTGTPGRQQQRVKKPHRWRPGTVALREIRKYQKSTELLIPFAPFARLVREITDFYSKGKVTRWTPQALLAMQEAAEFHLIELFEVSNLCAIHAKRVTIMQRDIQLARRIGGRFW

SEQ ID NO: 26 - DNA, 474 bp, Sorghum bicolor
atggctcgaaccaagcaccaggccgtgaggaagctgccgcagaagcccaagaagaagctccagttcgagcgcgcaggtggggcgagtacgtcggcgaccccggagaggaggaatgctgggaccgggggaggagccgcggctcgcgttgcacgggggcgtgtggagaagaagcatcgctggcgggcagggactgtagcgctgcgggagatcaggaagtaccagaagtccactgagccgctcatcccctttgcgcccttcgtacgtgtggtcaaagagttaactgcattcataacagactggaggatagggcgctacacccctgaagccctccttgcgctgcaagaggcagcagaattccacttgatagaactgtttgaagtggcgaatctgtgtgccatccatgccaagcgcgtaacagtcatgcaaaaggacatacaacttgcaaggcgtatcggaggaaggcgttggtcgtga

SEQ ID NO: 27 - protein, 157 aa, Sorghum bicolor
MARTKHQAVRKLPQKPKKKLQFERAGGASTSATPERRNAGTGGGAAARVARGRVEKKHRWRAGTVALREIRKYQKSTEPLIPFAPFVRVVKELTAFITDWRIGRYTPEALLALQEAAEFHLIELFEVANLCAIHAKRVTVMQKDIQLARRIGGRRWS

SEQ ID NO: 28 - DNA, 471 bp, Vitis vinifera
atgaatataaaaatagaatcgagggaaaaaaaatctaacagccattttatatatgtacctgcaacacctgcttcgccagcatcggctggaccgagttcggcaccacccagaaggccaacaaggactgcaacggatgcttcaccaaggagtcagggacaaaggaagccttttcgctataggccaggaactgtggctcttcgggagattcggcgatttcagaagaccacgcatctactaatcccagctgctcctttcattagaactgttagagagattagctacttttttgctccagaaatttctcgttggacagccgaagctttagtagcacttcaggaggcagcagaggattatctggttcatttgtttgaagatgcaatgctttgtgcaattcatgcaaaacgcgtaacactaatgaaaaaggactgggagttggcacgtcggattggagggaaaggacagccttggtga

SEQ ID NO: 29 - protein, 156 aa, Vitis vinifera
MNIKIESREKKSNSHFIYVPATPASPASAGPSSAPPRRPTRTATDASPRSQGQRKPFRYRPGTVALREIRRFQKTTHLLIPAAPFIRTVREISYFFAPEISRWTAEALVALQEAAEDYLVHLFEDAMLCAIHAKRVTLMKKDWELARRIGGKGQPW

SEQ ID NO: 30 - DNA, 1295 bp, Zea mays
aagcatctctcactgcattccgggcccactactcaaacgttcggcacgccaggttggcaggtagccgttacatcgataggcactcggccactcgcacgcagacaccacaccagtgtgctcagtgctcactgctcaccataataacgctgcacctcttttcatttcaccatctcctgcccccttaaaaaaaagactcaccgtcgacacgccctcccgtcccgagagttctgaatcgaaaccgtcggccacgagagcagtgcgaggcgcccaccgcgatggctcgaaccaagcaccaggccgtgaggaagacggcggagaagcccaagaagaagctccagttcgagcgctcaggtggtgcgagtacctcggcgacgccggaaagggctgctgggaccgggggaagagcggcgtctggaggtgactcagttaagaagacgaaaccacgccaccgctggcggccagggactgtagcgctgcgggagatcaggaagtaccagaagtccactgaaccgctcatcccctttgcgcctttcgtccgtgtggtgagggagttaaccaatttcgtaacaaacgggaaagtagagcgctataccgcagaagccctccttgcgctgcaagaggcagcagaattccacttgatagaactgtttgaaatggcgaatctgtgtgccatccatgccaagcgtgtcacaatcatgcaaaaggacatacaacttgcaaggcgtatcggaggaaggcgttgggcatgatatataatatccattctgattgcatcattcttgtgaatttgtttgtaggagctagacattagtgttgttgaatgctgcatggttcctaatccttttcgcagtctaacatctgtggagttagtatgttacatggcaacagctgaacatctgtggactatatggcaacagccgaagattgtgtctgtgggataactggttgttttggttgctcttcagtagtttgtttgcttcagtctgcagtatggactatggagtaaactgcatgctgaaacccgaaccactgctgaaactgcatgctgaaacccgaaccactgctacggcagttgccaggatagcaggagggcctttatgcacagtggaattgagtagagaactgagtaaaccatggttctttctccttttgaactggaacacacacagttggatcttgtttctcttcttaggccattcatcgtgtttattaggggtgtaaatggtacaaatattatctgtccgtattcgaatttgatctatctaagaaggttgaaatccgatccgtattcgagt

SEQ ID NO: 31 - protein, 157 aa, Zea mays
MARTKHQAVRKTAEKPKKKLQFERSGGASTSATPERAAGTGGRAASGGDSVKKTKPRHRWRPGTVALREIRKYQKSTEPLIPFAPFVRVVRELTNFVTNGKVERYTAEALLALQEAAEFHLIELFEMANLCAIHAKRVTIMQKDIQLARRIGGRRWA

SEQ ID NO: 32 - DNA, 660 bp, Brassica napus
gactcactctcttccccaagaacactcgccgcttcaagagtctcaccagtccgtcaatcgcctactgaagattcagagccaccggatcttgaaaatggcagaggcgagagatcgattggagaagccggtggattacgcggcgatatttgccaacagacgcagtcacggtgtgttgctcgacgagccagcgtcgcgtctcggtgtgttcgaacatccagttcgcagattaccgtcgggttctcgggtgtatccacaacctggaggcaattacagttcatggaggcctggtcatgggaatgggagtggtcagagtccgtttagattctcccagggaagagagaatgtgactatggcgtctgctaggcgtggaagaggtggtgcttcagggagtttgttaccttcttggtacccaaggacgcctctacgtgatataactcacattatgcgggctattgagagaaaaagaagagctggtatgggagtagagagtgccctggggggtgagactccatctcaccaacaagttcgttttcttgaaactccggtcgcattggcggaagatgagcacaattgcgtaatgatgacacctgctccagctgtgggattgaagcgtagttgcccaccatcaaccgctaaagtccataagatgttgcttgacat

SEQ ID NO: 33 - DNA, 744 bp, Brassica rapa
atggcggaggcgagagatcgattggagaagccggtggattacgcggcgatatttgccaacagacgcagtcacggtgtgttgctcgacgagccagcgtcaggtctcggtgtgttggaacatccagttcgcagattgccgtcgggttctcgggtgtatccacagcctggatctttgattggaggcaactacagttcgtggaggcctggtcatgggagtggtcagagtccgtttagatcctctcagggaagagagaatctgcctaggcgtggaagaggtggtgcttcagggagtttgttaccttcttggtacccaaggacgcctctacgtgatataactcacattatgcgggctattgagagaaaaagaagagctggtatgggagtagagagtgccctggggggtgagactccatctcaccaacaagttcgttttcttgaaactccggtcgcattggcggaagatgagcacaattgcgtaatggtgacacctgctccagctgtgggattgaagcgtagttgccctccatcaactgctaaagtccacaagatgttgcttgacatcacaaaggagatatctgagaaggatgaagaagcagggttcatcactcccgagaagaagctactcaattctatcgacgtggtggagaagattgtgatggcggagattcagaaactgaagagcactccgcttgcaaaacggcaagagcgggagaagagggtcaagactttgatgtcgatgcgatga

SEQ ID NO: 34 - protein, 247 aa, Brassica rapa
MAEARDRLEKPVDYAAIFANRRSHGVLLDEPASGLGVLEHPVRRLPSGSRVYPQPGSLIGGNYSSWRPGHGSGQSPFRSSQGRENLPRRGRGGASGSLLPSWYPRTPLRDITHIMRAIERKRRAGMGVESALGGETPSHQQVRFLETPVALAEDEHNCVMVTPAPAVGLKRSCPPSTAKVHKMLLDITKEISEKDEEAGFITPEKKLLNSIDVVEKIVMAEIQKLKSTPLAKRQEREKRVKTLMSMR

SEQ ID NO: 35 - DNA, 672 bp, Brassica rapa
atgccagaagcgagagaccgacgcgagaggtctgtggattaccccgccgcgtttctcaaccggcgatcccacgggatcttgctcgacgagtcaccacttcggtctcctgttcagagactgccttcttcagaatcgttagtgtttgggagaggtggatttgcgaggggcaatttgggaattcgacggacaggtggcggtggaggtagaaggcgtggcagggcacgtgcctcagcttctgtgttgccttcttggtatccaagaacgcctctccgtgacgtgtcttctgtcgttagggcgattgagaggaggagagctcgtgtgggagacgttgagaccccaactccacagcagcttgaggtggttcttgatgattctttagcaccagtgtctggcgagcggaactactccatggtgactcctggtccgtctgttgggttcaagcgtccctggccgccttcgactgctaaagtccatcagattctgctcgacatcacaaggcagagttcagcggaagaggaagaggaagcgctcactccgcagaagaagctcctcaactctattgataaagtggagaaggttgtgatggaagagattcagaagatgaagagcactcctagtgctaagagagctgaaagggagaaaagggtccggactttaatgtccatgcgatga

SEQ ID NO: 36 - protein, 223 aa, Brassica rapa
MPEARDRRERSVDYPAAFLNRRSHGILLDESPLRSPVQRLPSSESLVFGRGGFARGNLGIRRTGGGGGRRRGRARASASVLPSWYPRTPLRDVSSVVRAIERRRARVGDVETPTPQQLEVVLDDSLAPVSGERNYSMVTPGPSVGFKRPWPPSTAKVHQILLDITRQSSAEEEEEALTPQKKLLNSIDKVEKVVMEEIQKMKSTPSAKRAEREKRVRTLMSMR

SEQ ID NO: 37 - DNA, 648 bp, Glycine max
atgcccgaatcacgcgaccgtcgcataaccgtcgtcgacctcgccgccgccatcgcccgccgccgcgcctcattcatctacatcgattctccgccgctccgaacgcctcaaagaaccgccgccatcggccgtggaagagctagcggttctcccggctctcagaacacacctccatcaactgctcgacgtggtagaggacgcgttccgtcacgcaacgtgcttcccgcgtggtaccctaggacaccactccgtgacattactgttgtcgttcaggcgatcgagaggagaagagcgaggtcaggagaagccgaaggccagcgaatcggaagcaccgatcctgcttcggatcgattagttacagaaccttccgaacctgcttctgctgattctgcggtgaaatcgccgaaatccgttggtgtgaagctccgaacgccgttcggcagcaaagtgccgaagatcttcctcgacatttcggagttaccggaagacgacgaatcggagactctgacgccgcagaagaagcttcttaacaacatcgatcaggttgaggaagccgtgcgcgaagaactgaagaagctgaagagaactccgagtgcgaagaaagcagagagggaaaagcgcgttcgcacattgatgtccatgaggtga

SEQ ID NO: 38 - protein, 215 aa, Glycine max
MPESRDRRITVVDLAAAIARRRASFIYIDSPPLRTPQRTAAIGRGRASGSPGSQNTPPSTARRGRGRVPSRNVLPAWYPRTPLRDITVVVQAIERRRARSGEAEGQRIGSTDPASDRLVTEPSEPASADSAVKSPKSVGVKLRTPFGSKVPKIFLDISELPEDDESETLTPQKKLLNNIDQVEEAVREELKKLKRTPSAKKAEREKRVRTLMSMR

SEQ ID NO: 39 - DNA, 657 bp, Glycine max
atgccccaatcacgtcaccgtcgcgtaaccgtcgtcgacctcgccgcctccttagcccgccgccgcgtctcatttatcttcaacgaagctccgactctccgtacccctccaagaaccgccgccttcggtcgcggaagagctcgcgcttctccccgctcccagaacataccgccatcaactgcgcgacgtggtagaggacgcgttccgttacgctccgtgcttccggcgtggttccctaggacaccactccgtgacattactgctgtcgttcaggcgatcgagaggagaagtgcgaggctaggagaagtcgaaggccagcgaatcggaaacactgatcctgcttcagatcgtttagtttcggaaccttccgaacctgcttctgcttctgcctctgcctctgcggtgaaatcgccgaaatcagttggagtgaaactccgaacgccgttcgggagcaaggtcccgaagatcttcctcgacatatccgagttaccggaacacgacgaatcggaggctctgacgccgcagaagaagcttctcgacaacatcgatcaggttgaggaagcggtgcgcgaagaactgaacaagctgaagagaactccgagcgcgaagaaaacagagagggaaaagcgggttcgcacattgatgtccatgaggtaa

SEQ ID NO: 40 - protein, 218 aa, Glycine max
MPQSRHRRVTVVDLAASLARRRVSFIFNEAPTLRTPPRTAAFGRGRARASPRSQNIPPSTARRGRGRVPLRSVLPAWFPRTPLRDITAVVQAIERRSARLGEVEGQRIGNTDPASDRLVSEPSEPASASASASAVKSPKSVGVKLRTPFGSKVPKIFLDISELPEHDESEALTPQKKLLDNIDQVEEAVREELNKLKRTPSAKKTEREKRVRTLMSMR

SEQ ID NO: 41 - DNA, 717 bp, Medicago truncatula
atgccggaagcacgagaccgccgcgtcattcctcttgacgtggatactctattccgacgacctttctccgccgtgtttcaagaatctgagccactctccgttacacccgcacctgctccattcaccgccggtttagatctgttcttcactgaaagaactcccgtacgtcgcgaagttgctcgtgcgcgtcgttctccaggttcggaaaatactcctccgaccactgctcgccgtggaagaggccgtgctactgcatcgaggagtgcacttccgtcttggtacccgaggacgccgttgcaggatatcactgctattgttcgagcgattgagagaaggagggagagacagggaactgaggaaattgagcaaactggaacaccagttcatgctaaccagctgaccattttctctgatccatcttcattctctgctgctattggatcttcttcacgcgtccacaaaaaatcaccaaaatcctgcatcaagctgaaaacaccttatggaagtaaagttccaaaaatcatcattgacattgcaaaacttcctgctgctgaagatggtgaatctgagcttctgactcctcagaagaagctattgcattcgattgatataattgagcgtgaagtgaagcaagagttgatgaaactcaagagaacccctacagccaaaaaagcagaacatcagaaaagggttaggaccttgatgtccatgaggtga

SEQ ID NO: 42 - protein, 238 aa, Medicago truncatula
MPEARDRRVIPLDVDTLFRRPFSAVFQESEPLSVTPAPAPFTAGLDLFFTERTPVRREVARARRSPGSENTPPTTARRGRGRATASRSALPSWYPRTPLQDITAIVRAIERRRERQGTEEIEQTGTPVHANQLTIFSDPSSFSAAIGSSSRVHKKSPKSCIKLKTPYGSKVPKIIIDIAKLPAAEDGESELLTPQKKLLHSIDIIEREVKQELMKLKRTPTAKKAEHQKRVRTLMSMR

SEQ ID NO: 43 - DNA, 1044 bp, Oryza sativa
atggtgagtggttttttgagatttgggggtccgttgttttgtccattttttgatgaactgtttgctgggtgttctgatgcgtctgtttgcctctgtcgttgcagatctggtgaggtttttgaatctgagcaggaggctgaggaggatttccgggggataggaggagaaggaactctagctaggattcatacgagtagaaattacagcaatatgcctgagatgagggatagcaagaggacggcccttggcgagctctccggcggtggcgggttcttcatcaggagggtggcctcgccgggtgctcttgcggcgaggggccccgggaagccgttggctcggcggttcatacggccatcgaacaacaaggagaacgtgcccccggtttgggctgtgaaggccacagccacaaagaggagaagcccacttcctgattggtacccgaggacgccgttgcgtgacatcacggcgattgcaaaggctattcagagaagccgcttaaggattgctgctgctcagcagcgaagccagacacctgagcagaatactccccattgcactgaagttcgggactcccttgatgttgaacctggcatcaactcaactcaaattgttgcgacccctgcatctagcttggccaaggacagtctgaagattttctcctcgccatctgaaacatcacttgttaccccgtccaagccgatggatccagtccttctggatgatatggagaagaaactgtccagctcaatagagcagatagagaagatggtgaggagaaacctgaagagaactccgaaggcggcggctgctcagccttccaagagggccatccagaggcgcacactcatgcttaccattgcatggtgctctgctcgaggacctagttctaggattaacagctggaagtgccagaatattttgaagtatagcaagaatgcacaatacctgctgccaatagtgaagcaccaaaactgccatgaggaagactggggtgtccccgaaaaagagaggaaaactggagtggctgtggctgacaaagcttga

SEQ ID NO: 44 - protein, 347 aa, Oryza sativa
MVSGFLRFGGPLFCPFFDELFAGCSDASVCLCRCRSGEVFESEQEAEEDFRGIGGEGTLARIHTSRNYSNMPEMRDSKRTALGELSGGGGFFIRRVASPGALAARGPGKPLARRFIRPSNNKENVPPVWAVKATATKRRSPLPDWYPRTPLRDITAIAKAIQRSRLRIAAAQQRSQTPEQNTPHCTEVRDSLDVEPGINSTQIVATPASSLAKDSLKIFSSPSETSLVTPSKPMDPVLLDDMEKKLSSSIEQIEKMVRRNLKRTPKAAAAQPSKRAIQRRTLMLTIAWCSARGPSSRINSWKCQNILKYSKNAQYLLPIVKHQNCHEEDWGVPEKERKTGVAVADKA

SEQ ID NO: 45 - DNA, 705 bp, Oryza sativa
atgcctgaagtgagaaattccggcggtagggcggcgctcgccgacccctcgggtggtgggttctttatcaggaggacgacgtcgccgccgggagccgtggcggtcaagccgctggctcggcgggccctgccgccgacgagcaacaaggagaacgtgccgccgtcctgggctgtgaccgtgagggctacacccaagaggaggagccccctgcccgagtggtacccgaggagcccactccgcgacatcacgtcagtcgtcaaggcagttgagaggaaaagtcgcctcggaaatgctgcggttcggcagcagatccagttgagtgaagattcttcacgatctgtggatccagcaactccagtacaaaaagaagaaggtgtccctcaaagcacaccaacaccaccaactcaaaaggccctggatgctgctgccccttgtcctggctcaacccaagctgttgcaagcacatcaacagcttacttggccgagggcaagccgaaggcatcatcttcttctccatctgactgctcctttcagacaccatccagaccaaatgatccagctcttgctgatctcatggagaaggaactgtccagctccatagagcagatagagaagatggtaaggaagaacctcaagagagctccgaaggctgctcagccttccaaggtgaccatccagaagcgcaccctgttgtccatgagatga

SEQ ID NO: 46 - protein, 234 aa, Oryza sativa
MPEVRNSGGRAALADPSGGGFFIRRTTSPPGAVAVKPLARRALPPTSNKENVPPSWAVTVRATPKRRSPLPEWYPRSPLRDITSVVKAVERKSRLGNAAVRQQIQLSEDSSRSVDPATPVQKEEGVPQSTPTPPTQKALDAAAPCPGSTQAVASTSTAYLAEGKPKASSSSPSDCSFQTPSRPNDPALADLMEKELSSSIEQIEKMVRKNLKRAPKAAQPSKVTIQKRTLLSMR

SEQ ID NO: 47 - DNA, 651 bp, Oryza sativa
atgcatgaatcgaggactgcccgcaggccggctctcgccgacatctctggtggtgggttctttatcaggagagtagaatcgccaggagctgtgctggtgaaaggtgctgtcaagccgctggctcgacgcgccctgtcacagtcaagcaacaaggagaatgtgccaccagtgggagctgtgaggggtgcaccaaagaggaagagcccgttgcctgactggtacccgaggactccactccgtgacatcacatcaatcgtcaaggcaattgaaaggagaagtcgtctgcagaatgctgcaactgagcagacgatcctgtggacagaagattcttcccaatctgtggatccaataactccagcatctgcagagcagggtgtgccaacaattgagggaggtcaagctgttgcacgccatgcaacttctttgggggatggcaagctgaagacatcttcctctccatttgactgctccttgcaggccactccatccaaaccaaatgatccagctctcgcagatctcatggagaagaagctgtccaactcgatagagcagatcgaaaagatggtcaggcgaaacctgaagaaaactccgaaggccgctcagccttccaagaggaccatccagagtcgcatcctgatgtccatgcgatga

SEQ ID NO: 48 - protein, 216 aa, Sorghum bicolor
MHESRTARRPALADISGGGFFIRRVESPGAVLVKGAVKPLARRALSQSSNKENVPPVGAVRGAPKRKSPLPDWYPRTPLRDITSIVKAIERRSRLQNAATEQTILWTEDSSQSVDPITPASAEQGVPTIEGGQAVARHATSLGDGKLKTSSSPFDCSLQATPSKPNDPALADLMEKKLSNSIEQIEKMVRRNLKKTPKAAQPSKRTIQSRILMSMR

SEQ ID NO: 49 - DNA, 801 bp, Vitis vinifera
atgccggaatcaagagacagactgtcgagacctgaagacatcgcggagttgttccttcgccgtcggtccggcattcttgggattttagcagatggatcggagaggagctccaacttgttcgcgtctccttcccggcgtgagactacgacgaggacgacgacgttgggtgcacgtggagcgaccggaatcttggcatcgagagggggtggggtgggaaggggcggctttggaaccccaagaatcggaactggacgtggccgtggccgggctgtgtaccgatcgcctctgtttggtcgagagaataccccggcaaccggaagtggtcggcgaggaagaggtcgttccggaaattccgtgttgccatcttggtatccaagaacacctcttcgtgacatcactcatgttgttcgggcgattgaaaggagaagagctcgcttgagagaaattgacggtcagcaaatcgacattccaatcccccaggatatttctgatgttcatgaccccattttgcccccatctagtgctcaactcgagcaggatatttctatgatctccccaagcccaacaagcggaatgaagcttgttccaaaggctgttggtaaggtgccaaagattttgcttgatatcaccgatcagactggtggaggatcagattttctcacaccccagaagaaactcctcaattccattgacacggttgagaaggcagtgatggacgagctcgggaaattgaagcgaacgcccagtgcgaagcgggccgaacaagagaaaagggtacgcactttgatgtctatgcgttga

SEQ ID NO: 50 - protein, 266 aa, Vitis vinifera
MPESRDRLSRPEDIAELFLRRRSGILGILADGSERSSNLFASPSRRETTTRTTTLGARGATGILASRGGGVGRGGFGTPRIGTGRGRGRAVYRSPLFGRENTPATGSGRRGRGRSGNSVLPSWYPRTPLRDITHVVRAIERRRARLREIDGQQIDIPIPQDISDVHDPILPPSSAQLEQDISMISPSPTSGMKLVPKAVGKVPKILLDITDQTGGGSDFLTPQKKLLNSIDTVEKAVMDELGKLKRTPSAKRAEQEKRVRTLMSMR

SEQ ID NO: 51 - DNA, 1526 bp, Zea mays
caacaaggacagagcagaaacttagccagagattcgtccaggataggggctgtatcgtagggagtagtcgttgcggagattgggtcgaagcggactggacaggagccgagcaaactatctgcagaagaggttaaagggttgccgtgcggactccggagctgtgagaatctaccccgaggtaagctcttagagtcgtagtcaaagaggagaagccaggccgggaacaaacagaaaagtgaggagatttgttggtgcattagctactcacgcgtcccctgaaattctgcttgttaactccatcctaaaatttattgtgtggacccaggagaagagcaacaggagtacaggactcagtgcaccaagaataggaaagagcaaagaccataacagttgtatgagatactgtgatttctgggttcatttgtttatctgattatgcgttctttggtctcttgcatcactcatgtggttgtatgcactcctccaggaacttcaagatgcttgaagtgaggactgcaagaaggccggctctcgccgacatctctggtggtgggttctttatgaggacagtagaatcgccaggagctgtgctggtgaatggtgctgtcaagcggccggctcggcagtttctatcaccttcaagcaacaaggagaatgtgccaccagtgggagctttcagggctacaccaaagaggaggacccccttgcctgactggtacccgaggacaccactccgtgacatcacatcaatcgtcaaggcaattgagaggaggagaagtcgtctgcagaatgctgcagctcagcagcagatccagtggacagaagacccttcccgatctgtggatccaataactccagtacaggcagagcagggtggtgtgccaacaactgtggatggtcaaggtgttggaagccctgcaacctgtttggaggatggcaagctgaagacatcgtcctatccatcatctgactgctccttgcaggccactccatccaaaccaaacgatccagctctcgcagatctcgtggagaagaagctgtccagctcgatagagcagatcgagaagatggtgcggcgaaacctgaagagaacttcgaaggccgctcagccttccaagaggaccatccagaggcgcgtcctgatgtccatgcgatgagctgagaaagctatctgctctgccatggcttcccttgtctgctgctttcttagcagcaagtcgtaaccaaccattacgccagttttgcctgaaggaggggtggggccgtgggggctcctggttctctgcttgaggaccccggggtatgcggcttactactagctctctgcttgagggtacacattatggtgactgcgtatttttaatttgagaaattagtagttctatgtatagttttatagtgtggaacggatatgagaaattagtagcaattgtgacttcgacagcttgaatactgttgttatggagtagttcctctatactgttgtttccgagtaacataacacagttttggccatcagtaatgga

SEQ ID NO: 52 - protein, 227 aa, Zea mays
MHSSRNFKMLEVRTARRPALADISGGGFFMRTVESPGAVLVNGAVKRPARQFLSPSSNKENVPPVGAFRATPKRRTPLPDWYPRTPLRDITSIVKAIERRRSRLQNAAAQQQIQWTEDPSRSVDPITPVQAEQGGVPTTVDGQGVGSPATCLEDGKLKTSSYPSSDCSLQATPSKPNDPALADLVEKKLSSSIEQIEKMVRRNLKRTSKAAQPSKRTIQRRVLMSMR

SEQ ID NO: 53 - DNA, 939 bp, Brassica napus
cttatacaaaacgctctcaagacaaaaatggcgatggcaaaggagatctagggtttcgatggattctccttcagcgttccctcgcgcgccgcatctaaccagctctatgtccccgagcttgaccgtattgtgcttaaagacaaatctaccctccgtccctttgcgtcagtatcttccgtcaggaaaactacaatcaccacgcggatcctcgcccttatccaccaactctgcctcaggaacatccacgtcaccaagcgtgatctcttctacactgacgttaagcttttccaggaccagacacagagcgatgctgtgttggacgatgtgtcgtgtatgctcggctgcacaaggtcaagcctcaatgtaattgcagcagagaaaggtgtggtggtgggaaggctcatattcagtgacaacggagacatgatcgactgcacaaagatggggatgggtgggaaagcaattccaccgaacatcgatcgagttggagacatgcagagtgatgctatgttcatactcttagttgagaaagatgcagcttacataaggttagctgaagacagattctacaaccggttcccctgcatcatcgtcactgcaaaaggccagcccgatgtagccacaaggctgttcttgaggaagatgaaaatggagctcaagcttccggtgctcgccttggtggatagtgatccttacgggttgaagattctgtcggtttatggatgcgggtcgaagaacatgtcttacgatagtgcaaacttgactacacctgatattaagtggcttgggatcaggccaagtgatttggacaagtacaagatacctgagcagtgtaggttgccgatgacagagcaggatatcaagaccgggaaggatatgctagaggaggatttcgtgaagaagaatcccggggtgggtcgaagaacttaacctgatggt

SEQ ID NO: 54 - protein, 198 aa, Brassica napus
MLGCTRSSLNVIAAEKGVVVGRLIFSDNGDMIDCTKMGMGGKAIPPNIDRVGDMQSDAMFILLVEKDAAYIRLAEDRFYNRFPCIIVTAKGQPDVATRLFLRKMKMELKLPVLALVDSDPYGLKILSVYGCGSKNMSYDSANLTTPDIKWLGIRPSDLDKYKIPEQCRLPMTEQDIKTGKDMLEEDFVKKNPGVGRRT

SEQ ID NO: 55 - DNA, 1089 bp, Brassica rapa
atggagggaaattttcaaatttcagagacgactaatctgcttcgaaagatcaaagagtttacgcgatcgatcgttgaagatctagccgagggaaaatctccagaaatctccatcaatcgattcagaaactactgcaacgatccagaagcagactgtttttgcagctccgatgaaccgaaaggtcgggagattctcacgcttaggaagagatcgcaaacctatagaatcgatatgttgctgagagtattgttgatagttcaacaacttctccaagaaaatagacatggatccaaaagagatatctactatatgcatccatcagcattcaaagcacaatcggctgtagaccgcgcaattgctgatatatgcatcctttttcagtgtagtcgttacagcttgaatgtggtgtctgttggaaatgggttggtgatggggtggttaaagtttagggaagctggaaggaagtttgattgtttaagcagcctgaatactgcatttcccgttcctgttcttgtagaggaagtcgaagatattgttagtttggcagagtacatactggtggtggaaaaagaaacagtattccagcgtttagcaaatgacatgttttgcaagacgaaccgctgcatcgttgtcacaggaagaggctatcctgatgtttctacaagaaggttcttgcgactcttgatggagaagttgcaactacctgtgcattgtctagtcgactgtgatccatatggctttgagatcctagccacataccgttttggctccatgcaaatggcatatgatatagaatcactacgagcaccagaaatgaaatggttgggagcttttccttcggactctgacatatacggtgttccccaacagtgtctcttgcccttgacagaagaagataagaaaagaactgaagcaatgttgcttagatgctacctgaagcgtgaaatgccacaatggaggttggaacttgaaacgatgctgaaaagaggagtgaagtttgagatcgaagcactctcagttcactcactctcgtttttatcagaagtttacattccttctaaaatacgtagtgagggaagtttccattga

SEQ ID NO: 56 - protein, 362 aa, Brassica rapa
MEGNFQISETTNLLRKIKEFTRSIVEDLAEGKSPEISINRFRNYCNDPEADCFCSSDEPKGREILTLRKRSQTYRIDMLLRVLLIVQQLLQENRHGSKRDIYYMHPSAFKAQSAVDRAIADICILFQCSRYSLNVVSVGNGLVMGWLKFREAGRKFDCLSSLNTAFPVPVLVEEVEDIVSLAEYILVVEKETVFQRLANDMFCKTNRCIVVTGRGYPDVSTRRFLRLLMEKLQLPVHCLVDCDPYGFEILATYRFGSMQMAYDIESLRAPEMKWLGAFPSDSDIYGVPQQCLLPLTEEDKKRTEAMLLRCYLKREMPQWRLELETMLKRGVKFEIEALSVHSLSFLSEVYIPSKIRSEGSFH

SEQ ID NO: 57 - DNA, 1104 bp, Glycine max
atggagggaaagaggacgaggttccagtcggagtcacagccacagagcgtaattctactcacgaaaatcaaagaattcactcgagctttgctcgcagacctcaccaacggacgctcaccgctcattctcatcgatcgcttcagaagctactgcaccctttccaactccaactgcttttgtgcctccgatttgccgtgcggaaaggaacttctcacgcttcgcaggaaatcccacgcccacagactagctgtcatgttgagagtgatgctgatagttcagaaacttttgcaagagaacaagcatagttccaagagagacatttattacacctatccttctgtatttttggatcagtcggtggttgaccaagcaattaatgatatatgtattcttatgcaatgcagtcgccataaccttaatgtggtttctgcagggaacgggttaattatgggctggataagattttctgaaggagaaaggatatttgattgcataagttctcccaacactgcccaccctgttcctgttcatgttgaagaagttcaagatatcattagtcttgctcaatacatattagttgtggagaaagaatcagttttccaaaggctagcaaacgaccaattctgcaatgcaaatcactgtattgtcatcactggaagaggttacccggatattcctacaagaaggtttttgcgtcttctggttgagaatttgtgcctacctgcttattgcttggtagattgtgatccctatggctttgacatcttaaccacttacagatttggttcaatgcaaatggcctatgacacgaaacatcttcgtgtcccagagatacaatggcttggagcttttccttctgattctgagagatattttgttccgaatcagtgtctccttccattgactgctgaagacaaaagaaaagttgaagccatgctacttagatgctaccttgaaagggaggtaccacaatggaggttggagctacagttgattctgcaaagaggagtaaagtttgagattgaagccttatctgtgcacgcactttcattcttgtcagagtcttacataccatctaaaattgaaggtaaattgataatgtag

SEQ ID NO: 58 - protein, 367 aa, Glycine max
MEGKRTRFQSESQPQSVILLTKIKEFTRALLADLTNGRSPLILIDRFRSYCTLSNSNCFCASDLPCGKELLTLRRKSHAHRLAVMLRVMLIVQKLLQENKHSSKRDIYYTYPSVFLDQSVVDQAINDICILMQCSRHNLNVVSAGNGLIMGWIRFSEGERIFDCISSPNTAHPVPVHVEEVQDIISLAQYILVVEKESVFQRLANDQFCNANHCIVITGRGYPDIPTRRFLRLLVENLCLPAYCLVDCDPYGFDILTTYRFGSMQMAYDTKHLRVPEIQWLGAFPSDSERYFVPNQCLLPLTAEDKRKVEAMLLRCYLEREVPQWRLELQLILQRGVKFEIEALSVHALSFLSESYIPSKIEGKLIM

SEQ ID NO: 59 - DNA, 1254 bp, Glycine max
atggcagacaacaaaaaacgccggcgcaaggaccccgccggcgacgagctacccttcaagaacaagctgaaacccgactcagcaatcatggaaaccctaaagcagttctccgcctcctcctcctcctcctccgtctcccaaaccctaaccctccaggacctctccatccccttccggtgccgcgaggtggcagacctctccctctcctccgtgcagtccaacatcgagtccctcatcctcaggatcgcccactccatcctctccggccacggcttctctttcgacgtcccttcccgctccgccgccaaccagctctacgtgcccgagctcgaccgcatcgtcctcaaggacaaatcctcccttcgcccgtttgcgaacatctccactgtgcggaaatccgccatcaccgcccgcatcctgcagctcatccaccagctctgcatcaagggcatccatgtcaccaagcgtgacctcttctacaccgacgtcaaactcttccaggaccagatccaatctgatgctgttctggatgatgtgtcctgcatgctggggtgcactcggtccagcctcaatgtcgttgctgcggagaaaggggtggtggttgggaggttgattttcagtgacaatggggatatgatcgattgcaccaaaatggggatgggagggaaggcaattccgccaaatattgatcgagttggggatatgcagagtgatgctttgtttattttgttggtggagaaggatgctgcttatatgaggttggctgaggataggttctacaaccgttttccatgcataattgtgactgcaaaggggcagccagatgtttccactaggctgttcttgaggaagatgaagacagagttgaagctgccggtgctggctctagttgacagtgatccttatgggttgaagattctgtcggtttatggctgtgggtccaagaacatgtcttatgacagtgctaacttaaccacccctgatatcaagtggcttggggttaggcctagtgatttggacaagtacaagatacctgagcagtgtaggttgccgatgaccgagcaggatattaagactggtaaggacttgctggaggaggattttgtcaagaagaaccctggttgggtggaggaattgaccttgatggtcaagactaagcaaaaggctgaaatacaggctttgagcacttttggttttcagtatctgtcagaagtttatttgcccttgaagttgcagcagaaagattggctttga

SEQ ID NO: 60 - protein, 417 aa, Glycine max
MADNKKRRRKDPAGDELPFKNKLKPDSAIMETLKQFSASSSSSSVSQTLTLQDLSIPFRCREVADLSLSSVQSNIESLILRIAHSILSGHGFSFDVPSRSAANQLYVPELDRIVLKDKSSLRPFANISTVRKSAITARILQLIHQLCIKGIHVTKRDLFYTDVKLFQDQIQSDAVLDDVSCMLGCTRSSLNVVAAEKGVVVGRLIFSDNGDMIDCTKMGMGGKAIPPNIDRVGDMQSDALFILLVEKDAAYMRLAEDRFYNRFPCIIVTAKGQPDVSTRLFLRKMKTELKLPVLALVDSDPYGLKILSVYGCGSKNMSYDSANLTTPDIKWLGVRPSDLDKYKIPEQCRLPMTEQDIKTGKDLLEEDFVKKNPGWVEELTLMVKTKQKAEIQALSTFGFQYLSEVYLPLKLQQKDWL

SEQ ID NO: 61 - DNA, 1260 bp, Glycine max
atggcagacaacaaaaagcgccggcgaaaggaccccgccggcgacgagctccccttcaaaaacaagctgaaaccggactccgcaatcatggaaaccctaaagcagttctccgcctcatcctcctcctcctccgcctccgtctcacaaaccctaaccctccaggacctctccctccccttccgctgccgcgaggtggcggacctctccctctcctccgtgcagtccaacatcgagtccctcattctccggatcgcccactccatcctctctggccacggcttctccttcgacgtcccctcccgctccgccgccaaccagctctacgtccccgagctcgaccgcatcgtcctcaaggacaaatcctctcttcgccccttcgcgaatatctccaccgtgcggaagtccgccatcaccgcccgcattctgcagctcatccaccagctttgcctcaagggcatccacgtcaccaagcgtgacctcttctacaccgacgtcaaactcttccaggaccagatccaatctgatgctgttctggatgatgtgtcctgcatgctggggtgcactcggtccagcctcaatgttgtggctgcagagaaaggggtggtggttgggaggttgattttcagtgacaatggggatatgattgattgcaccaaaatggggatgggcgggaaggcaattccaccgaatattgatcgagttggggatatgcagagtgatgctttgttcattctgttggtggagaaggatgctgcttatatgaggttggctgaggataggttctataaccgctttccatgcataattgtgactgcaaaggggcagcccgatgtttccactaggctgttcttgaggaagatgaagatagagttaaagctgccggtgctggctctagttgacagtgatccttatgggttgaagattctgtcggtttatggctgtgggtcaaagaacatgtcttatgacagtgccaacttaaccacccctgatatcaagtggcttggggttaggcctagtgatttggacaagtacaagatacctgagcagtgtaggttgccgatgaccgagcaggatattaagactggcaaggacttgcttgaggaggattttgtcaaaaagaaccctggttgggtggaggaattgaccttgatggtcaaaactaagcaaaaagctgaaatacaggctttgagcacctttggttttcagtatctgtcagaagtttatttgcccttgaagttgcagcagaaggattggctgtga

SEQ ID NO: 62 - protein, 419 aa, Glycine max
MADNKKRRRKDPAGDELPFKNKLKPDSAIMETLKQFSASSSSSSASVSQTLTLQDLSLPFRCREVADLSLSSVQSNIESLILRIAHSILSGHGFSFDVPSRSAANQLYVPELDRIVLKDKSSLRPFANISTVRKSAITARILQLIHQLCLKGIHVTKRDLFYTDVKLFQDQIQSDAVLDDVSCMLGCTRSSLNVVAAEKGVVVGRLIFSDNGDMIDCTKMGMGGKAIPPNIDRVGDMQSDALFILLVEKDAAYMRLAEDRFYNRFPCIIVTAKGQPDVSTRLFLRKMKIELKLPVLALVDSDPYGLKILSVYGCGSKNMSYDSANLTTPDIKWLGVRPSDLDKYKIPEQCRLPMTEQDIKTGKDLLEEDFVKKNPGWVEELTLMVKTKQKAEIQALSTFGFQYLSEVYLPLKLQQKDWL

SEQ ID NO: 63 - DNA, 1248 bp, Medicago truncatula
atgaaattaaaacttgaagaagaagattctggaaaaatggagggaaagagaaagaaattggaatcaaaaaaatcagagaatgggattcttctactcgacaaaatcaaagttttcactcgaagtttgctagttaacctaaccaacagaaaatcaccgatcatcctcatcgatcgattcaaaaatcactgtactctttcagattccaactgcttctgtggctccgatttgccggttggaaaggaagttctaacactttgcaaggaaacccatgttcgcagattagatgtgatgttgagagttctggtgattgttcagaagcttttacaagagaacaaacatagttcaaaaagagacatttattacatgcatccatctgtctttttggaccagtcagttgtggaccatgctattaatgatatatgtgtcttgatgcagtgcagccgccataacctcaatgtggtttctgccgggaatgggttagttatgggctggataagatttgtcgaaggaaaaaagatatttgactgcatcagttctcccgacacctgccgagaattaacattgctttactttttgcccatagatattgtaagcgcggctcgttacatattagttgtcgagaaagaatcaggcaagcaaatgctgtattttttagggagagtcgatgttgaacttgcagttttccagagattagcaaatgaccagttctgcaaatcaaaccattgcattgtcatctctggaagaggctacccagatattcctacaagaaggtttttgcggcttcttgttgagaatttgcacatacctgcttattgcctggtagactgtgatccctatggatttgatatcttgaccacttatagatttggctcaatgggttctcaacatgaagtatacatgattgttgagtggatcaaatctttgtctaatgaccgacaaatggcttatgacacgaaacatcttcgtgtccctgagatacactggcttggagcttttccttcagattctgagagatactttgttccaaaacagtgcctccttcctttgactgctgaagacaagagaaaaattgaagccatgttgcttaggtgctacctgcaaagggaggtgccacaatggaggttggagctcaaaatgatgttgcagaaaggagtgaagtttgaaatcgaagcactgtctgttcatacactttcattcttgacagagtcttatataccatccaaaattcatggtaaagttcaaatctag

SEQ ID NO: 64 - protein, 415 aa, Medicago truncatula
MKLKLEEEDSGKMEGKRKKLESKKSENGILLLDKIKVFTRSLLVNLTNRKSPIILIDRFKNHCTLSDSNCFCGSDLPVGKEVLTLCKETHVRRLDVMLRVLVIVQKLLQENKHSSKRDIYYMHPSVFLDQSVVDHAINDICVLMQCSRHNLNVVSAGNGLVMGWIRFVEGKKIFDCISSPDTCRELTLLYFLPIDIVSAARYILVVEKESGKQMLYFLGRVDVELAVFQRLANDQFCKSNHCIVISGRGYPDIPTRRFLRLLVENLHIPAYCLVDCDPYGFDILTTYRFGSMGSQHEVYMIVEWIKSLSNDRQMAYDTKHLRVPEIHWLGAFPSDSERYFVPKQCLLPLTAEDKRKIEAMLLRCYLQREVPQWRLELKMMLQKGVKFEIEALSVHTLSFLTESYIPSKIHGKVQI

SEQ ID NO: 65 - DNA, 1146 bp, Oryza sativa
atggcggggagggagaagaggcggcgggtggcggcgctcgacggcgaagagcggcggcggcggcaggaggaagcggcgaccctcctccacaggatcagagggttggtgcgctgggtcgtcgccgaggtcgccgccggccgctccccgaccgtcgcgctccaccgctaccagaactactgctcctccgcctccgccgccgccgcgtccccatgcgcctgcagctacgacgtccccgtgggcacagatgtactctcgctcctccaccggggctcccacgcctcccggctcaatgtgctcctcagggttcttctcgtcgtgcagcaactcctgcagcagaacaagcactgctccaagagggacatctactacatgtacccctccatattccaagaacaagcggttgttgaccgtgcaatcaatgatatatgcgtactcttcaagtgcagccggcacaatctcaatgtggttcctgtggcaaaaggcttggtgatgggctggattagatttttagagggagaaaaggaagtctattgtgtaacgaatgtcaatgctgccttctctatcccagttagcatcgaagcaataaaagatgttgttagtgttgcggactacatacttattgtcgagaaggagacagtgtttcaacgtttggctaatgacaagttctgtgaaaggaatcgctgcattgtgattacaggaagaggctacccagatattccaacaagaagattcttgcgctaccttgttgaacagctgcatttgccagtttactgtttggtggatgcagacccttatggtttcgacattctggctacctacaaatttggttcactgcaattggcatacgatgcaaatttcctgcgtgtgcctgatattcggtggcttggggtcttcacatctgattttgaggattatcgccttccagactgctgcctacttcacttgtcgtctgaagacagaaggaaagctgaaggaattctctcaaggtgttacttgcacagggaagccccacaatggaggttggagttagaagccatgttgcaaaagggtgtcaaatttgagattgaggcgttatctgcatgttccatttcctttttatcagaagagtacattcccaagaagatcaaacaaggaagacatatataa

SEQ ID NO: 66 - protein, 381 aa, Oryza sativa
MAGREKRRRVAALDGEERRRRQEEAATLLHRIRGLVRWVVAEVAAGRSPTVALHRYQNYCSSASAAAASPCACSYDVPVGTDVLSLLHRGSHASRLNVLLRVLLVVQQLLQQNKHCSKRDIYYMYPSIFQEQAVVDRAINDICVLFKCSRHNLNVVPVAKGLVMGWIRFLEGEKEVYCVTNVNAAFSIPVSIEAIKDVVSVADYILIVEKETVFQRLANDKFCERNRCIVITGRGYPDIPTRRFLRYLVEQLHLPVYCLVDADPYGFDILATYKFGSLQLAYDANFLRVPDIRWLGVFTSDFEDYRLPDCCLLHLSSEDRRKAEGILSRCYLHREAPQWRLELEAMLQKGVKFEIEALSACSISFLSEEYIPKKIKQGRHI

SEQ ID NO: 67 - DNA, 1152 bp, Setaria italic
atggccgggagggacaagaggaggtgtgcggcggcactcggctgcgacaagcagcggctgcgaaggcggcaggacgcggcggcgctccttctccgcaggatcaaagggctcgtgcgctgggtcgtcaaggaggtcgccgccggccgctccccgtccatcgtgctccaccggtaccggaactactgctccgccgccgacgctgcgtccccgtccccatgtgcctgcagctacgacgcccccgtaggcacggacgtcctctccctgctccacaaggactgccacacctcccgcctcaatgtgctcctgagggtgctgctcgtggtgcagcagctcctgcagcagaacaagcactgctccaagagggacatttactacatgtacccctccattttcgtagaagtagctgttgttgaccgtgccattaatgatatctgcatactcttcaagtgcagtcggcacaatctcaatgtggttcctgtcgtgaaaggtttggtgatgggctggataagatttgtggagggtgaaaagaaagtgtattgtataacaagtgtcaatgctgctttctccatccctgttagcattgaggcaatcaaagatgttgttagtgttgctcactacatacttgtagttgagaaggagacagtgttccagcgtttggccaatgacaagttctgtgaaagaaatcgctgcatcgttattacaggaagaggctacccagatattccaacaagaagattcctgagacaccttgttgaacagctgcatctgcctgcttattgcttagtggactcagatccttatggttttgacattctggccacatataaatttggttccttgcaattggcatatgatgcaaacttgctgcgtgtacctgatatacggtggcttggggttttcacatccgactttgaggatttttgccttccagactgttgcctccttcacttgtcacctgaagataggaggaaagctgaaagtattcttgctaggtgctatttacacaaggaagccccagaatggaggtcggagctggaagcaatgttacaaaagggtgtcaagtttgagattgaggcactatctgcaagctccatttcatttttatcggacaaatacatcccccagaagatcaaacaaggaaggcatttataa

SEQ ID NO: 68 - protein, 383 aa, Setaria italica
MAGRDKRRCAAALGCDKQRLRRRQDAAALLLRRIKGLVRWVVKEVAAGRSPSIVLHRYRNYCSAADAASPSPCACSYDAPVGTDVLSLLHKDCHTSRLNVLLRVLLVVQQLLQQNKHCSKRDIYYMYPSIFVEVAVVDRAINDICILFKCSRHNLNVVPVVKGLVMGWIRFVEGEKKVYCITSVNAAFSIPVSIEAIKDVVSVAHYILVVEKETVFQRLANDKFCERNRCIVITGRGYPDIPTRRFLRHLVEQLHLPAYCLVDSDPYGFDILATYKFGSLQLAYDANLLRVPDIRWLGVFTSDFEDFCLPDCCLLHLSPEDRRKAESILARCYLHKEAPEWRSELEAMLQKGVKFEIEALSASSISFLSDKYIPQKIKQGRHL

SEQ ID NO: 69 - DNA, 1152 bp, Sorghum bicolor
atggcggggagggacaagaggcggcgagcggcgccgctcgaaggcgacgagcagcagttgcggcggaggcaggaggaggcggcgctcctcctccgcaggatcaaagggcttgtgcgctgggtcgtggaagaggttgccgccggtcgttccccgtccatagtgctccaccggtaccggaactactgctccgccgccgactctgcgtccccgtctccatgtgcctgcagctacgacgtccccgtcggcacggacgtcctctccctgctccacaatgactaccacacctcccgcctcaatgtgctcctgcgggtgctgcttgtggtgcagaaactcctgcagcagaacaagcactgctccaagagagacatctactacatgtacccctccatcttcgtagaagtagcagttgttgaccgtgccatcaacgatatctgcatactcctcaagtgcagtcggcacaatctcaatgtggttcctgtagtgaaaggtttggtgatgggctggataagattcgtggagggtgaaaagaaagtgtattgtataacaaatgtcaatgctgctttctccatccctgttgatattgaggcaatcaaagatgttgttagtgttgctcactacatacttgtggttgagaaggagacagttttccagcgtctggccaatgacaagttttgtgaaagaaatcgctgcattgttattacaggaagaggctacccagatattccaacaagaagattcctgcggtaccttgttgaacagctgcatctgcctgcttattgcctagtggactcagatccttatggttttgacattctggctacctataaatttggttccttgcaattggcacatgatgcaaacttgttgcgtgtgcctgatatacggtggcttggagtcttcacatctgattttgaagaatattgccttccagactgctgcctacttcatttgtcacctgaagataggaggaaagctgaacgtattcttgctagatgctatttacacagggaagtcccagaatggaggtcagagttggaagcaatgttgcaaaagggtgtcaagtttgagattgaggcactatctgcaaattccatttcctttttatcggatgaatacattccccagaagatcaaacaaggcatgcatttataa

SEQ ID NO: 70 - protein, 383 aa, Sorghum bicolor
MAGRDKRRRAAPLEGDEQQLRRRQEEAALLLRRIKGLVRWVVEEVAAGRSPSIVLHRYRNYCSAADSASPSPCACSYDVPVGTDVLSLLHNDYHTSRLNVLLRVLLVVQKLLQQNKHCSKRDIYYMYPSIFVEVAVVDRAINDICILLKCSRHNLNVVPVVKGLVMGWIRFVEGEKKVYCITNVNAAFSIPVDIEAIKDVVSVAHYILVVEKETVFQRLANDKFCERNRCIVITGRGYPDIPTRRFLRYLVEQLHLPAYCLVDSDPYGFDILATYKFGSLQLAHDANLLRVPDIRWLGVFTSDFEEYCLPDCCLLHLSPEDRRKAERILARCYLHREVPEWRSELEAMLQKGVKFEIEALSANSISFLSDEYIPQKIKQGMHL

SEQ ID NO: 71 - DNA, 1089 bp, Vitis vinifera
atggagggaaagcgttcaagctcacaacgcagcgatctgcttcggaagataagagagtttactcgatcaattctggatgatctctcgattggaaaatctccagtggttttgattgatcggttcagaaattattgcacagataacactggaaactgctgttgcagctctgatttgtccaagggcaaggagattctcacacttcagagggaatgtcatgcacgtagactggatgtcttgctaagagtgctattgatcgttcagcaacttctacaagaaaatagacatggatcaaagagagatatatattacatgcatccgtctgtattttcagatcagtcagttgtagaccgagcaataaatgacatatgtatccttctgcagtgcagtcgccacaacctaaatgtgagacctttgtctaagggattattggtgatgggctggttaagattcttagaagctggaaagaaatttgattgcataaatggcccaaacactgcctaccctgtccctgtgcatgttgaagaagtcaaagatattgtcagtgttgcccagtatatattggttgtggagaaagaatcagtgttccagcggttagcaaatgacaaattctgcaacaaaaatcgctgcattgttatcacaggaagaggatatccagatatccctacaagaaggtttttgcgtcttctcgtagagaagttgcatctgcatgtctattgcttggtagattgcgatccttatggctttgacatcctgacaacatatcggtttggttccatgcaaatggcctatgatgcaaaatttctacgagtcccagagatagaatggcttggagcttttccttcagactctgagaaatatggtcttccagaaccatgtcttcttcctttgacagcagaagataagaggaaaaccgaagccattttacatcgatgctatctccaacaagaattgctgcactggaggttggaactagagctgatgctgcaaagaggagtaaaatttgagatcgaagcattgtctgtgcattcactttcctttttgtccgaaaattatataccatccaagattcaagttgcagagggcgtgtaa

SEQ ID NO: 72 - protein, 362 aa, Vitis vinifera
MEGKRSSSQRSDLLRKIREFTRSILDDLSIGKSPVVLIDRFRNYCTDNTGNCCCSSDLSKGKEILTLQRECHARRLDVLLRVLLIVQQLLQENRHGSKRDIYYMHPSVFSDQSVVDRAINDICILLQCSRHNLNVRPLSKGLLVMGWLRFLEAGKKFDCINGPNTAYPVPVHVEEVKDIVSVAQYILVVEKESVFQRLANDKFCNKNRCIVITGRGYPDIPTRRFLRLLVEKLHLHVYCLVDCDPYGFDILTTYRFGSMQMAYDAKFLRVPEIEWLGAFPSDSEKYGLPEPCLLPLTAEDKRKTEAILHRCYLQQELLHWRLELELMLQRGVKFEIEALSVHSLSFLSENYIPSKIQVAEGV

SEQ ID NO: 73 - DNA, 1292 bp, Zea mays
tcttcgcgatcgattagctgattagctccatggcggcttcgaaaaaatcaaaataaaaaactagcgccatggcggggagggataagaggcgacgagcggcgccgctcgaaggcgacgagcagcagttgcggcggaggctggaggaagcggcgctcctcctccgcaggatcaaagggcttgtgcgctggatcgtcgaagaggttgccgccggccgctccccgtctatagtgctccaccggtaccggaactattgctcctccgccgactctgcgtccccgtccccatgtgcctgcagctacgacatccccgtcggcacggacgtcctctctctgctccacaaggactaccacacctcccgcctcagtacgaatacatctaaatctttgcatttatgtgatcacactaattactttctgatgcgttgttcatgcgtagatgtgctcctgagggtgctgttcgtggtgcagcagctcctgcagcagaacaagcactgctccaagagggacatctactacatgtacccctccatcttcgtagaagtagcagttgttgaccgtgccatcaacgatatctgcatactcttcaagtgcagccggcacaatctcaacgtggttcctgtagtgaaaggtttggtgatgggctggataagatttatggagggcgaaaagaaagtgtattgtataacaagcgtcaatgctgctttctccattcctgttgacattgaggcaatcaaagatgttgttagtgttgcccactacatacttgtggttgagaaggagacagtgttccagcgtttggccaatgacaagttctgtgaaagaaatcgctgcattgttattacaggaagaggctatccagatattccaacaagaagattcctgcggtaccttgttgaactgctgcatctgcctgcttattgcttagtggactcagatccttatggtttcgacattctggctacctataaatttggttccttgcaattggcacatgatgcaaacttgttgcgtgtccctgatatacggtggcttggagttttcacatctgattttgaagaatattgccttccagactgctgcctacttcgtttgtcacctgaagataggaggaaagctgaaggcattcttgctaggtgctatttacacagggaagccccagaatggaggtcagagttggaagcaatgctgcaaaagggtgtcaagtttgagattgaggcactatccgcaaattccatttcctttttatcgcatgagtacattccccagaaaatcaaacaaggcatgcatttataa

SEQ ID NO: 74 - protein, 407 aa, Zea mays
MAGRDKRRRAAPLEGDEQQLRRRLEEAALLLRRIKGLVRWIVEEVAAGRSPSIVLHRYRNYCSSADSASPSPCACSYDIPVGTDVLSLLHKDYHTSRLSTNTSKSLHLCDHTNYFLMRCSCVDVLLRVLFVVQQLLQQNKHCSKRDIYYMYPSIFVEVAVVDRAINDICILFKCSRHNLNVVPVVKGLVMGWIRFMEGEKKVYCITSVNAAFSIPVDIEAIKDVVSVAHYILVVEKETVFQRLANDKFCERNRCIVITGRGYPDIPTRRFLRYLVELLHLPAYCLVDSDPYGFDILATYKFGSLQLAHDANLLRVPDIRWLGVFTSDFEEYCLPDCCLLRLSPEDRRKAEGILARCYLHREAPEWRSELEAMLQKGVKFEIEALSANSISFLSHEYIPQKIKQGMHL

SEQ ID NO: 75 - DNA, 612 bp, Brassica napus
actgagacgtatgatcgctttgaaagatttgacatcgaaggagatgatgaaactcagttgaactttaattcaagagaaggcgctcaaatacctccaactctgatcccatcaccacctcgtcatcatgattttgctgaaggaggcaatcccacaagccctcagccccaggagcaacaagagcgcggtagggatgtatttgctgagcagacgggggagcaaaacataccggacagagaggtattttcctcactaggatacttccatctcgtgaaaaaaaaatggaaattggattttttttctgcaagtaggaccaagatataccacggccaacaaaaaaaagagcaagaaggacagctacttcagccatggattatgagcagactattatcgctggtaatcaataccagtcatggcttcaggatacttctcacattctcctgaggggaaaaaagagaaaggctcgaggacccgccagcccaagttttgaggttactaaacgtatgaagatgccacttacacaactctttgaagagcatgtggacggttcttacccacctcagctcatggagctttggtcaaaatgcactcaccctcttcaagccactacatctg

SEQ ID NO: 76 - DNA, 1845 bp, Brassica rapa
atgataatcttccgtgcatttgattatccgatgcaaagctacggagagaggatggctgctacgttgcacgcgaagatcaatcggaagaagctgaacaagctcgacatcatccaaatctgcgaagagattctcaacccgtcggttccaatggctctcagactctctgggattttgatgggtggggttgtcatcgtttacgagaggaaagtaaagctcctattcgatgacgtcactcgccttctggtagaaattaatggagcttggcgcacaaaagctgctccggatcctactttactacctaaaggacgaacccatgccaggaaagaggctgttacgttacctgacaaggacgaagctgattttggggatttcgaacagactcgtagtcagttacccaaattccccaatttcatggattttcagcagtcttatatctccatgcggttagatgaacccaatgtcaacgatatccccgagcaagaggatctccatcaagctgctgccgagaatatcacactcttcgagtatcatgcttcataccagactaatactgagacgtatgatcgctttgaaagatttgacatcgaaggagatgatgaaactcagttgaacttcaatccaagagaaggctcgcaaatacctccaactctgatcccatcaccacctcgtcatcatgattttcctgaaggaggcaatcccacaagccctcagcgccaggagcaacaagagaacggtagggatgcatttgctgagcagacggcggaacaaaacataccggacagagaggaccaagatgtaccacggccaacaaaaagaagagcaagaaggacagctacttcagccatggattgtgagcagactattatcgctggtaatcaataccagtcatggctccaggatacatctcacattctcttgaggggaaaaaagagaaaggctcgaggacccgctagcccaagtattgaggttacaaaacgtatgaagctgccagttacacaactctttgaagagcatgtggacggttcttacccacctcagctcatggagctttggtcaaaatgcactcagcctcttcaaacctctacatctgaaactggacgccctgatctctcggcggagcattctccagggtttggccaggagagaatgcaagaccaccatcaaacagaccatcatcagggcactgagacaagcttccaaaatcttggcagtcccgcagaaagacttcggaacgttcttgctgagaaagatggttctatagaaggcctgatggctcgatctcgagcaagcgctgagaataataaccaggctgctgctgatattagcgttacacctctctattctggagatgatgtgagatccatgcctagcacaccatcagcacgtggggcagcttccattaacatagagatcaactctaacagtcgcaggctcaacagaaaaaggcaacattcgtcaccaagaagaggactcgaaccagtagcggaagacagaacgtgggagcaccgtgcttatgactttgagttttcaatgatacctgaaaagggattcacagctgataacgaagtactagctgagactggacctacacaaactcaaaagccagtgaccactcacacagacgagaagataactgatagcatcaaaagtcacctcaagacgcactttgaaacacctggagctcctcaagtggaatctcttaacaagctcgctattggaatgaaaagaaacgctgcagctcaactcttctaccaatcctgtgtgctagccactcgcggagtcataaaggtggagcaaacacagccttatggggacattctcattgcacgaggacccaatatgtaa

SEQ ID NO: 77 - protein, 614 aa, Brassica rapa
MIIFRAFDYPMQSYGERMAATLHAKINRKKLNKLDIIQICEEILNPSVPMALRLSGILMGGVVIVYERKVKLLFDDVTRLLVEINGAWRTKAAPDPTLLPKGRTHARKEAVTLPDKDEADFGDFEQTRSQLPKFPNFMDFQQSYISMRLDEPNVNDIPEQEDLHQAAAENITLFEYHASYQTNTETYDRFERFDIEGDDETQLNFNPREGSQIPPTLIPSPPRHHDFPEGGNPTSPQRQEQQENGRDAFAEQTAEQNIPDREDQDVPRPTKRRARRTATSAMDCEQTIIAGNQYQSWLQDTSHILLRGKKRKARGPASPSIEVTKRMKLPVTQLFEEHVDGSYPPQLMELWSKCTQPLQTSTSETGRPDLSAEHSPGFGQERMQDHHQTDHHQGTETSFQNLGSPAERLRNVLAEKDGSIEGLMARSRASAENNNQAAADISVTPLYSGDDVRSMPSTPSARGAASINIEINSNSRRLNRKRQHSSPRRGLEPVAEDRTWEHRAYDFEFSMIPEKGFTADNEVLAETGPTQTQKPVTTHTDEKITDSIKSHLKTHFETPGAPQVESLNKLAIGMKRNAAAQLFYQSCVLATRGVIKVEQTQPYGDILIARGPNM

SEQ ID NO: 78 - DNA, 1722 bp, Glycine max
cttcttgctcgaaaggcaccactcggtcaaatatggatggctgcgacaatgcacgcaaagattaaccgaagaaagctagacaagctcaacatcatcaaaatttgcgaagagattctaaacccatcgattcctatggctcttagactttctggaattctgatgggaggagtagtgattgtctatgagagaaaagtgaagctcctttatgaggacgtgacccgttttctggttgagataaacgaagcctggaaagtaaagactgctccagatcctacattgctccccaagtccaaatccaaggccaaaaaagaggctgttactctgccagggaccggtgaaacgaacatggaagatattgaacagtcccttcagttttccaacacaggcaccacaacaggattccaacataacgcctattttactatgcgacttgataatgtggatgaacccttcactaataatggagcaagagaggaccaagatcaatcagaacttctccatcaagttgacgcagagaatattaccttatttgaacgctttgaaacgttccaagctaacacggatacatacaatcgctttgagaggtttgatattgaagaagatgaggaaacacaggtaaatgtaacttcaggagatcaaattctaaccacgcttgtaccctccccacctcatcaagacgaacccaccaaagctgatacgtttcaagaccatcatcctggacacccagacattcagcaacctagtgaaggcatgatacctagacaggaacctagaaggcgaggaccaaataaaaggaaaagaggacaaccatcggctattgaaatggattatgagcaaaccattattcctgctcacatatatcaacactggcttcagaatgcttctgacattgtctcgcgaaggggaagaaggaaaaaggcaccgaagagacagatcatgtatgatattttagcattcaaccacctcatgattcaccttcaggtcagcatagagtctctctctggggtgcctgggggaaaggatttcagcccaccatcctccagaaccatcattttcatcgcctccaggagaggaaatccttctgaagattttgacggtaggccagactaccaggcacctccaatggagaaggctcgggaacatatcctcatggatgaactgacagctagccttttgagagggcatgaagctactcctcaggtctcatctgggaaagctggaggcagtgtacattcctttccaagaccgacgtctgaaaatggtcctgcctcacattcagattttgattcgggaagaactgttcacagattcaaaaataaaaggtattcatcatctgcaaacagcagtggaggccttgagccactagctgaagatgtaaatttcaagttagctagactgtatgaagatgtatattacttgttaaggcttctctatttcttttcagaactcctcgtggaaacaggacccactcaaacacaagtaaacatcaatcatcctagtgacaagataaccgattccatccaagcgcagatgaaggcacattttgacacgcctggagctcctccagtggaatcccttcatatcctagctgctggaatgacacggacatcagcagcacaacttttctatcaaatttgtgttcttgcttcccgcgatgcgttgaaggttgaccaaaaggtgccctacggagagattctcttctctagaggattaagaatgtga

SEQ ID NO: 79 - protein, 573 aa, Glycine max
LLARKAPLGQIWMAATMHAKINRRKLDKLNIIKICEEILNPSIPMALRLSGILMGGVVIVYERKVKLLYEDVTRFLVEINEAWKVKTAPDPTLLPKSKSKAKKEAVTLPGTGETNMEDIEQSLQFSNTGTTTGFQHNAYFTMRLDNVDEPFTNNGAREDQDQSELLHQVDAENITLFERFETFQANTDTYNRFERFDIEEDEETQVNVTSGDQILTTLVPSPPHQDEPTKADTFQDHHPGHPDIQQPSEGMIPRQEPRRRGPNKRKRGQPSAIEMDYEQTIIPAHIYQHWLQNASDIVSRRGRRKKAPKRQIMYDILAFNHLMIHLQVSIESLSGVPGGKDFSPPSSRTIIFIASRRGNPSEDFDGRPDYQAPPMEKAREHILMDELTASLLRGHEATPQVSSGKAGGSVHSFPRPTSENGPASHSDFDSGRTVHRFKNKRYSSSANSSGGLEPLAEDVNFKLARLYEDVYYLLRLLYFFSELLVETGPTQTQVNINHPSDKITDSIQAQMKAHFDTPGAPPVESLHILAAGMTRTSAAQLFYQICVLASRDALKVDQKVPYGEILFSRGLRM

SEQ ID NO: 80 - DNA, 2046 bp, Glycine max
cttcttgctcgaaaagcaccactcggccaaatatggatggctgccacaatgcacgcaaagattaaccgtagaaagttagacaagctcaacatcatcaatatttgcgaggagattctgaacccatcgattcctatggctcttagactttctggaattctcatggggggagtagtgattgtctatgagagaaaagtgaagctcctttatgcgctcacgtttctgaattctccatcatttctttttttattaccttgttttctcgcagatgacgtgacccgttttctggttgaaataaacgaagcctggaaagtaaaagctgctccagatcctacattgcttcccaagtccaaatccaaggccaagaaagaggctgttactctgccagggaccggtgagacgaatgtggcagatattgaacagtcccttcagttttccaacacaggcaccacaaatggatttcaacataacgcatattttaccatgcgacttgacagtgtggatgaacccttcattagtaatggagcaagagaggaccaagatcaatcagaacttctccatcaagttgacgcggagaatattaccttatttgaacgctttgaaacattccaagctaatgcggatccttacaatcatctcttatttgaacgctttgagaggtttgatattgaaggagatgaggaaacacaggtaaacgtaacttcagcagatcaaattccaaccacgcttgtgccctccccacctcatcaagacgaacccaccagagttgcatttctttttctttcaccacatttcacttgtctgtaccctacacatatagcttatgccaatactggggttttgatggaagagactactgtaccatctagaccaaactcgttcatgacccaacctcggtatggtttgacaactccatcaaacttagttcctcatcataacttagaagcttggaaagttaccatcatcctggacacccagacattcagcaacctatataatgaccattatgttatgattgatgagaaaagaaatgaccaacgaagtgcaatgcaacaggaacctaaaaggcggggaccaaataaaaggaaaagaggacagccatcgactatagaaatggattatgagcaaaccattattcctgctcatatatatcaacactggcttcagaatgcttctgatattgtctcgcgaagaggaagaaagaaaaagatttttttaaggaaaactaaccgatgtcatgtcttcaacaaagatagccaacctcatgaagctgccacccgttctattatggacttatggattaagagcattcaaccacctcatgattcaccttcaggtcagcatagtgtgtctctctggggtgcctggggggtaaaggatttcagcccaccatcctccagaaccatcattttcatcgcctccaggaattttgacagtaggccagactaccaggcacctccaatggaaaaggctcgggaacatatcctcttggatgaactgacaactagccttttgagagggcatgaagctactcctcatatctcatcagggaaagctggagacagtgtacattcctttccaagaccaacgtctgaaaatggtcctgcctcacattcagattttgattcgggaagattcaaaaataaaaggtattcatcatctgcaaacagcagtggaggcctcgagccactaggaggccttgagccactagctgaagatgtaaatttcaagttagctagactgtatgaagatggtcccacacctgatcaagaactctttgtggaaacaggacccactcaaacacaagcaaacatcaatcatcctagtgacaagataaccgattcaatccaagcgcaaatgaaggcacattttgacacgcctggagctcctccagttgaatcccttcataacctagctgctggaatgacacggacatcagcagcacaacttttctatcaaatttgtgttcttgcttcccgcgatgcgctgaaagttgaccaaaaggttccctatggagagattgtcttctctagaggattaaaaatgtga

SEQ ID NO: 81 - protein, 681 aa, Glycine max
LLARKAPLGQIWMAATMHAKINRRKLDKLNIINICEEILNPSIPMALRLSGILMGGVVIVYERKVKLLYALTFLNSPSFLFLLPCFLADDVTRFLVEINEAWKVKAAPDPTLLPKSKSKAKKEAVTLPGTGETNVADIEQSLQFSNTGTTNGFQHNAYFTMRLDSVDEPFISNGAREDQDQSELLHQVDAENITLFERFETFQANADPYNHLLFERFERFDIEGDEETQVNVTSADQIPTTLVPSPPHQDEPTRVAFLFLSPHFTCLYPTHIAYANTGVLMEETTVPSRPNSFMTQPRYGLTTPSNLVPHHNLEAWKVTIILDTQTFSNLYNDHYVMIDEKRNDQRSAMQQEPKRRGPNKRKRGQPSTIEMDYEQTIIPAHIYQHWLQNASDIVSRRGRKKKIFLRKTNRCHVFNKDSQPHEAATRSIMDLWIKSIQPPHDSPSGQHSVSLWGAWGVKDFSPPSSRTIIFIASRNFDSRPDYQAPPMEKAREHILLDELTTSLLRGHEATPHISSGKAGDSVHSFPRPTSENGPASHSDFDSGRFKNKRYSSSANSSGGLEPLGGLEPLAEDVNFKLARLYEDGPTPDQELFVETGPTQTQANINHPSDKITDSIQAQMKAHFDTPGAPPVESLHNLAAGMTRTSAAQLFYQICVLASRDALKVDQKVPYGEIVFSRGLKM

SEQ ID NO: 82 - DNA, 1803 bp, Medicago truncatula
atgttttactcacatcagcttcttgctagaaaagcacctctcggtcaaatttggatggcggcaacgatgcacgccaagatcaacaggaagaagttgaataagctcaatatcatcaaaatctgtgaagagattctgaatccagcgattcccatggctctgagactttctggaatactcatgggaggtgttgtgattgtgtatgaacgaaaagtgaagctactctatgatgatgtttcacggcttctggttgagattaacgaagcatggaaggttaagagtgccccagatcctacagtgcttcctaaaggaaaatctcaagctaagagaaacgaaataactataccaaataaagaacgaggttccatcgaggaagacattggaaattcatatcagtccactgcaaccactgcaacgaggttccatcgtagtgcttatttttccatgcgacttgatactttggatcttggtaatgaacgaattgaggaggaagatccatcggtgcatcaccatcaagctgatccggacaatattaccttacctgaacgtttccaagctgatgcagttccacacaatcaatatgagaggtttgaaggagatgaagaaacacaagtgaatggaacttcaggggactgtgctcaatttggaaaaccatccccacctccaccaaatgaaacaacgatagatgatataattgaagaccaacatcctgagcacccggtcattcagcaatctaatgacaacatgaatgctagagaggaacctcaaaggcgaaggccagctaaaaggaaaagaggaaaaccaatacaaatggacttcgagcaaaccatgatccctagtctgaattaccaaaattggcttcaagacccttctgatttagtctcaagaagaggaggaatacaaaaggtgcagaagcgacatgatatcatgtcttcatttaagatagttaacctcatggaggtgccacctgttgcgctatatggtggcttattgtcaactgtaaacaaagatatatattatccatcatctcttcttgacttatggattaagagcactcaaccaccacatgattcaccttcagttaggatttcagcagaccatcctccagaaccatcatctacatcacctccaggagtacaaaataatgagttcacaggacatggttctgaagaatttggcgatggtaggctagacaacatactttatgattcgcaagggaagttgctgccggtaggggaagagcttccagagaacattccaggctataatggtactccccaaattcatgtcgtccagccagaaatatttccaggaggaggggacaattcatattccgtgaggacagcatctgaacatggccattcctcacattcagacttggaaggaggaagagacacaaagagaaagcgttcatcatccagaaagagtggtggagggcttcatggcttacctgagaatgaaaagttcaataggttgtctgactttgctccaacacctgatcaaggtttcttttcagaacttcttgtggagacaggtcccactccaacacaaggaaaccccaatcattctagtgacaagataaccaaatcaatccaagctcagatgaaagcacattttgacactcataaatcagcaagtggagctcctcaatttgtgtccctggatatcctagctgctggaatgaccaaaaaatcagcagctatacttttctatcaaacctgtgttcttgctacccgcgatgtccttagagttgagcaaaaggagccttatggggagattcttatcttcagaggaccagagatgtga

SEQ ID NO: 83 - protein, 600 aa, Medicago truncatula
MFYSHQLLARKAPLGQIWMAATMHAKINRKKLNKLNIIKICEEILNPAIPMALRLSGILMGGVVIVYERKVKLLYDDVSRLLVEINEAWKVKSAPDPTVLPKGKSQAKRNEITIPNKERGSIEEDIGNSYQSTATTATRFHRSAYFSMRLDTLDLGNERIEEEDPSVHHHQADPDNITLPERFQADAVPHNQYERFEGDEETQVNGTSGDCAQFGKPSPPPPNETTIDDIIEDQHPEHPVIQQSNDNMNAREEPQRRRPAKRKRGKPIQMDFEQTMIPSLNYQNWLQDPSDLVSRRGGIQKVQKRHDIMSSFKIVNLMEVPPVALYGGLLSTVNKDIYYPSSLLDLWIKSTQPPHDSPSVRISADHPPEPSSTSPPGVQNNEFTGHGSEEFGDGRLDNILYDSQGKLLPVGEELPENIPGYNGTPQIHVVQPEIFPGGGDNSYSVRTASEHGHSSHSDLEGGRDTKRKRSSSRKSGGGLHGLPENEKFNRLSDFAPTPDQGFFSELLVETGPTPTQGNPNHSSDKITKSIQAQMKAHFDTHKSASGAPQFVSLDILAAGMTKKSAAILFYQTCVLATRDVLRVEQKEPYGEILIFRGPEM

SEQ ID NO: 84 - DNA, 1638 bp, Medicago truncatula
atgttctattcacaccagcttctagctcgcaaagcacctctcggtcaaatttggatggcggcaacgatgcacgctaagatcaacaggaagaagttgaataagctcaatatcatcaaaatctgtgaagaaattctgaatccagcgattcccatggctcttagactttctggaatactcatgggaggtgttgtgattgtgtatgaacgaaaagtgaagctactctatgatgatgtttcacgacttctggttgagattaacgaagcatggaaggttaagagtgttccagatcatacattgcttcctaaaggaaaatctcaagctaagagagcggcaatcactttgccgggtaaagaacagatgactctggaagaattggaactgtcccgtcagtccaatgcaaccactacatttaatcgtactgcttatttttccatgagacttgatactttggatgaatcattccttggtaatgaaggaaatgtggaggaagatccatcggtgcatcaccatcaagctgctcccgagaatattaccctatttgaacctttccaagctgatgcggttccttacaatcggtttgagaggtttgatatcgaaggagatgacgaaacacaagtaaatgtaccttcaggggattatgctcgatttccaataccctccccccctccaccagatgaaccaaagatagatgatatagttgaagaccaacaccctgagcacccgatcattcaggaatataatgataacatgaatgctagagaggaacctcagaggcgagggccagctaaacggaaaagaggaaaaccaatacaaatggactacgagcaaaccatgatccctgctcctaattaccaaaactggcttcaaaaccctgctgatttagtctcaagaagaggaggaatggaaaagttgaggcagcgacatgatatcatgtcttcaactaagatagctaacctcatggaggtgccacctgttgctctaaatggtggcttattgtcaaggggttttgaagaatttgatggtaggttagacaacctattcaatgctccgagagagcaggtgctgccggtagacaaggagctgccagagaacatgccagtacatgaagatactcctcctgtcttatcagagaaatctgacgtatttccaagaggaggagacaacacatattccgtgggtacagcatctgatcatggtccttcctcacattcagacttggaaacaggaagattaacaaagaaaaagcgtttaaacagcaatggagggtttcatacagtacctgagaatgaaaaaatgtatgcagatttcaatcctaggtcgcctgacatgtttccaacacctgatcaagtacttcttgtggagacaggtcccacgcaaacacaaggaaatcccaatcatcctagtgacaagataaccgaatcaatccatgctcagttgaaatcacactttgacactcttaaatcagtaagtggagctcctcaatttgagtctctagatgtcttagcttctggaatgaccagaaaatcagcagctctacttttctatcaaacctgtgttcttgcgacccgcgatgtccttagagttgagcagaaggagccttatggggagattcttatctcgagaggaccaaagatgtga

SEQ ID NO: 85 - protein, 545 aa, Medicago truncatula
MFYSHQLLARKAPLGQIWMAATMHAKINRKKLNKLNIIKICEEILNPAIPMALRLSGILMGGVVIVYERKVKLLYDDVSRLLVEINEAWKVKSVPDHTLLPKGKSQAKRAAITLPGKEQMTLEELELSRQSNATTTFNRTAYFSMRLDTLDESFLGNEGNVEEDPSVHHHQAAPENITLFEPFQADAVPYNRFERFDIEGDDETQVNVPSGDYARFPIPSPPPPDEPKIDDIVEDQHPEHPIIQEYNDNMNAREEPQRRGPAKRKRGKPIQMDYEQTMIPAPNYQNWLQNPADLVSRRGGMEKLRQRHDIMSSTKIANLMEVPPVALNGGLLSRGFEEFDGRLDNLFNAPREQVLPVDKELPENMPVHEDTPPVLSEKSDVFPRGGDNTYSVGTASDHGPSSHSDLETGRLTKKKRLNSNGGFHTVPENEKMYADFNPRSPDMFPTPDQVLLVETGPTQTQGNPNHPSDKITESIHAQLKSHFDTLKSVSGAPQFESLDVLASGMTRKSAALLFYQTCVLATRDVLRVEQKEPYGEILISRGPKM

SEQ ID NO: 86 - DNA, 2136 bp, Oryza sativa
cagcgcctccactctcactcgctcatccattccctccctcctcacgatcgagaatgttctactcgcaccagctcctcgcgcggaaggctccgctcggccagatatggatggcggcgacgcttcactcgaagatcaaccggaagcggcttgacaagctcgacatcatcaaaatctgtgaggagattttgaacccgtcggtacccatggcactaaggctctccggaattctcatgggtggtgtggcgatcgtgtacgagaggaaggtgaaggctctgtatgatgatgtgtctcggtttctgattgagatcaacgaggcatggcgggtcaagccagtcgcagaccccaccgtacttcccaagggcaaaacccaagccaagtatgaagcagtaacactgccagagaatatcatggatatggatgtggagcagcccatgcttttctcagaggctgatactacaaggttccggggaatgcgtttggaggatttggatgaccaatacattaatgtcaacctagacgatgatgacttctcgcgcgctgagaatcatcaccaagctgatgcagaaaatatcaccctggctgataatttcgggtctgggcttggagagactgatgtgttcaatcgttttgagagattcgacataacagatgatgatgcaactttcaatgtcactcctgatggacacccacaggttccaagtaatctggttccttctccacctaggcaggaagactctcctcagcaacaagaaaaccatcatgctgcctcatcccctcttcacgaagaagctcaacaagggggggcatctgtaaaaaatgagcaagagcagcagaagatgaagggtcagcaacctgctaaatcatcaaagagaaaaaaacgtaggaaagatgatgaggtgatgatggataacgaccagataatgatcccaggaaatgtatatcaaacatggctgaaggatccatcaagcctcattaccaaaaggcacagaatcaacagtaaagttaatcttattcggtcaatcaagataagagacctcatggacttgcccctcgtttctctaatatcttccttggagaagtcacccttagaattttattatcctaaggaacttatgcagctttggaaggaatgtactgaagtcaagtccccaaaagctccatcttcaggagggcagcagtcatcatcaccagaacaacagcaaagaaacttgcctcctcaggcatttccaacccagcctcaggttgataatgacagggaaatgggatttcacccagtggactttgcagatgacatcgaaaaactccgaggaaacactagtggggaatatggaagagattatgatgcttttcacagtgatcatagtgttactcctggaagtcctgggctaagtcgcaggtctgcttcaagctctggtggctctggacggggatttacgcagttggatccagaagtacagttgccatccggaaggtccaagaggcagcattcatctggaaaaagctttgggaacctcgatccagttgaagaagaattcccattcgagcaagaacttagagatttcaagatgagaaggctttcagatgttgggccaactccagacctgctggaagaaatcgaacctactcaaaccccatatgaaaagaaatccaatcctatcgaccaggtcacacaatcaatccactcgtacctcaagctacactttgacaccccaggggcctcacagtctgaatcattaagtcagctagcacatgggatgactacagcaaaggctgcccgactcttctatcaagcatgcgttttagcaactcatgattttatcaaggttaaccagctggaaccatacggagacatcttgatctcgaggggaccaaagatgtgacatcctaaatgtttaatagttggacaattttctgctgttgtggttcttgcacatctcgtgttatgtatggtgtttaagtttgcacatgaagtttagaaaaacttcgaaggaaggcttgtaggtacgttgtattggggcatgtatttaacactagttttgtgtaggaaagaaattttgtaagtatgctgaatggcttgatagctggtgcaaggttaaagttatacgatacctttctttctgtatatttaagatgatg

SEQ ID NO: 87 - protein, 608 aa, Oryza sativa
MFYSHQLLARKAPLGQIWMAATLHSKINRKRLDKLDIIKICEEILNPSVPMALRLSGILMGGVAIVYERKVKALYDDVSRFLIEINEAWRVKPVADPTVLPKGKTQAKYEAVTLPENIMDMDVEQPMLFSEADTTRFRGMRLEDLDDQYINVNLDDDDFSRAENHHQADAENITLADNFGSGLGETDVFNRFERFDITDDDATFNVTPDGHPQVPSNLVPSPPRQEDSPQQQENHHAASSPLHEEAQQGGASVKNEQEQQKMKGQQPAKSSKRKKRRKDDEVMMDNDQIMIPGNVYQTWLKDPSSLITKRHRINSKVNLIRSIKIRDLMDLPLVSLISSLEKSPLEFYYPKELMQLWKECTEVKSPKAPSSGGQQSSSPEQQQRNLPPQAFPTQPQVDNDREMGFHPVDFADDIEKLRGNTSGEYGRDYDAFHSDHSVTPGSPGLSRRSASSSGGSGRGFTQLDPEVQLPSGRSKRQHSSGKSFGNLDPVEEEFPFEQELRDFKMRRLSDVGPTPDLLEEIEPTQTPYEKKSNPIDQVTQSIHSYLKLHFDTPGASQSESLSQLAHGMTTAKAARLFYQACVLATHDFIKVNQLEPYGDILISRGPKM

SEQ ID NO: 88 - DNA, 1668 bp, Setaria italic
atggctctgaggctctctgggatcctcatgggtggcgtggtgatcgtgtacgagaggaaggtgaagcttctctatgatgatgtgtctcggcttttgattgagatcaacgaggcatggcgaatcaaaccggccacggaccccaccatcctccccaagggtaaagcccaagctaagtacgaagcagtaacgcttccagaaaaaattgtgaatatggaggtggaacagcccatgattttctcagaggctgatgctaccaggttccggggaatgcgattggatgatttggacgaacagtatgttaatgtcaacctagatgatgatgacttctctcgtgctgaacatcctcaccaagctgaggcagtgaatatcaccctggtcgataattttgagtccgggcttgcagaaactgatgtgttcaatcgttttgagagatttgacatagcagatgatgagaccacagtcaatatcactcctgatgaacacccacaggttccaagtactctagttccctccccgcctaggcatgaagacccccctcagcaagaagagccatattatgctgccccatcccctgttcaagaagaacctcaacaagaggagcaagaggaacaaaagatgaagcaacagcaaccacctaaagcatcaaagcggaaagcacgtaggaaactcgaccaagtgattatggacaataaccagatgatgatcccaggaaacatatatcagacatggctgaaggacgcatctagccttgtctcaaaaaggcgtaaagttaacagcaattttgattttattcgatcaaccaagataagcgatctcatggacatgcccccggttgctctaatgtcttacttggacaagtcatcctcagaattatattatcctaagccacttgtgcagctctggaaggaatgcactgcagtcaactgtgcaaaagcttcatcttcagggcagccaccatcatcacaagaaaaacagcctagaaactcgacacctcatgaatttccacctcagactgaaggagaatatgagatggaaacaggacctcacccaatggacttcacagatggcattgaaaaactcagaggaaacgtgagtgcggagtatgacagagcttacaatactctgcatagtgaccatagtgttactcctggaagtcctgggttaagtcggaggtctggttcgagctctggtggctctggacaggggtttataccattggatccagaagtgcaattgccatcatcaggaagtggaaggtccaagaggaggcaacattcctctggaagaagcttggggaatcttgatccagttgatgaagactttccattggagcaagaagtgagggacttcaagatgagaaggctttcagattttgggccaactcctgaccttctggaagaaaccgaaccaactcaaaccccatatgagaagcgctctgatcctatcgacaaggtcacagaatcaatccagtcgcacctcaaactacattttgataccccaggtggaccgcaatctgagtcactgaatctgctagcttcagggatgaccacagccagggcagctcgactattctatcaaatgactgttttggcaacttttgattacatcaaggttactcagctggaaccgtacggggacatcttgatctccaggggagtgaagatgtga

SEQ ID NO: 89 - protein, 555 aa, Setaria italica
MALRLSGILMGGVVIVYERKVKLLYDDVSRLLIEINEAWRIKPATDPTILPKGKAQAKYEAVTLPEKIVNMEVEQPMIFSEADATRFRGMRLDDLDEQYVNVNLDDDDFSRAEHPHQAEAVNITLVDNFESGLAETDVFNRFERFDIADDETTVNITPDEHPQVPSTLVPSPPRHEDPPQQEEPYYAAPSPVQEEPQQEEQEEQKMKQQQPPKASKRKARRKLDQVIMDNNQMMIPGNIYQTWLKDASSLVSKRRKVNSNFDFIRSTKISDLMDMPPVALMSYLDKSSSELYYPKPLVQLWKECTAVNCAKASSSGQPPSSQEKQPRNSTPHEFPPQTEGEYEMETGPHPMDFTDGIEKLRGNVSAEYDRAYNTLHSDHSVTPGSPGLSRRSGSSSGGSGQGFIPLDPEVQLPSSGSGRSKRRQHSSGRSLGNLDPVDEDFPLEQEVRDFKMRRLSDFGPTPDLLEETEPTQTPYEKRSDPIDKVTESIQSHLKLHFDTPGGPQSESLNLLASGMTTARAARLFYQMTVLATFDYIKVTQLEPYGDILISRGVKM

SEQ ID NO: 90 - DNA, 1809 bp, Sorghum bicolor
atgttctactcgcatcagctcctcgcgcggaagcagccgctcggccagatatggatggcagcgacgctccactcgaagatcaaccgcaagcggctcgacaagctcgacatcatcaaaatctgtgaggagattttgaacccctcggtgcccatggctctgaggctctctggaatcctcatgggtggcgtggtgatcgtgtacgagaggaaggtgaagcttctctactctgatgtgtctcggcttctgactgagatcaacgaggcttggcggatcaaaccggccacagacaccaccgtcctccccaagggtaaagcccaagccaagtatgaagcagtaacattgccagagaaaagtatcaatatggtggtggaacagcccatgtttttctcagagactgacggtgccaggttccgtggaatgcgattggaagatctggatgaacagtattttaatgtcaatcttggtgatgatgacttctctcatgctgatcatcgtcatcaagctgaagcagtgaatataactctggtcgataattttgagtctgggtttgcagaaactgatgtgttcaatcgctttgagagatttgacatagcagatgatgagaccacagtcaatatctctcctgatgagcacccaaaagttccaagtacactggttccctcaccacctaggcaggaagaccctcctcagcaagaagaacagtatgctgctcccttccttgttcgtgaagaacctcaacaagggggaccagaggagcagaagatgaagcagcagcaaacacctaaagcatcaaagcggaaagcacgtagggaactcccacaagtaattatggacaataaccagatgatgatcccgggaaacatatatcagacatggctgaaggatgcatcaagccttgtctcaaaaaggcgtaaagttaacagtaattttaattttattcgatcaaccaagataagtgatctcatggacatccccccagtttctctaatatctcatgacaactcgtcctcagaattatattatcctaagccacttatgcagctctggaaggactgcactgaagtcaagtccacaaaagtttcttcaggagggcagcgatcatcatcacaagaacaacagccgagaaactcaccacctcatgctgggggagagtatgagatggaaacaggtggtctgccgatggacttcacagatggcattgaaaaactcagagcaaacatgagtgcagagtatgacagagcttacgatactctgcatagtgaccatagtgttactcctggaagtcctgggttaagtcgcaggtctgcttcaagctctggtggctctggacaggcgtttataccactggatgcagaagtacaattgccatcaggaagtggaaggtccaagagggggcggcattcatctgcaagaagcttggggaatcttgatactgttgaggaggattttccactggagctggaagtgatggacgtcaagatgagaaggctttcagattatgcgccaactcctgacctactggaagaaactgaaccgactcaaaccccatatgagaggcgctccaatccaatggacaaggtcacagaagcaatcatgtcgcacctcaaacttcattttgatagcccaggtgccccgcaatctgaatccttaagtcatctagctcatgggatgaccaaagccagggcagcccgactattctatcaaacaaccgttttggcaacttttgattacatcaacgttactcagctgaaacctcacggagaggaactgtacggagacatcttgatctccagaggatcaaagatttga

SEQ ID NO: 91 - protein, 602 aa, Sorghum bicolor
MFYSHQLLARKQPLGQIWMAATLHSKINRKRLDKLDIIKICEEILNPSVPMALRLSGILMGGVVIVYERKVKLLYSDVSRLLTEINEAWRIKPATDTTVLPKGKAQAKYEAVTLPEKSINMVVEQPMFFSETDGARFRGMRLEDLDEQYFNVNLGDDDFSHADHRHQAEAVNITLVDNFESGFAETDVFNRFERFDIADDETTVNISPDEHPKVPSTLVPSPPRQEDPPQQEEQYAAPFLVREEPQQGGPEEQKMKQQQTPKASKRKARRELPQVIMDNNQMMIPGNIYQTWLKDASSLVSKRRKVNSNFNFIRSTKISDLMDIPPVSLISHDNSSSELYYPKPLMQLWKDCTEVKSTKVSSGGQRSSSQEQQPRNSPPHAGGEYEMETGGLPMDFTDGIEKLRANMSAEYDRAYDTLHSDHSVTPGSPGLSRRSASSSGGSGQAFIPLDAEVQLPSGSGRSKRGRHSSARSLGNLDTVEEDFPLELEVMDVKMRRLSDYAPTPDLLEETEPTQTPYERRSNPMDKVTEAIMSHLKLHFDSPGAPQSESLSHLAHGMTKARAARLFYQTTVLATFDYINVTQLKPHGEELYGDILISRGSKI

SEQ ID NO: 92 - DNA, 1839 bp, Vitis vinifera
atgttctactctcaccagcttcttgctcggaaagctgctcttgggcagatatggcgagttgctttttatcttttacttttgatggcagcgacgatgcatgcgaagatgaaccggagaaagcttgacaagctcaacatcattaaaatctgcgaagagattttgaatccgtcggttccgatggctctgaggctctcgggaattctcatgggtggagtagtgatcatctacgagcgaaaattgatgcattgtttggagatcggatatcttcaggtggaactgaacgaagcttggaaagtaaaagcaggagcaggttcacattccacagacctcccaaagcgaaaatctcaagccaaatatgaagccgttacgctgcctgataatgaagaaggagacgctccagagattgagcggttcctcaacttctccaacacagccaccacctgtctggacaacgtggatgaaacctacattactgggaacacaggaggagaagatgtattgcaagacaaccatcaagctgacgctgataatatcactttatgggaaccttttaattcgtatcaggctgatactaatctcaataatcgtgatgaaaggttcgaggaagatggggagatccagttgaacttcactccagcagaacagatcccaagtactcttataccatctccatcccatcaaaatgagcatcaaaaaggtgatcctgctgatgaaatccaagacctgcatccagaaaaccaggttaatcagcaacctgatgagcacaaggaagttaatcaggtagagcaatctgagcaggatcaaccgagacaagggataataagaaagagaggcagaaggccagcagcctttgtcatggatgatgaacaaatcatcattcctggtaatctataccagtcatggcttcaggatccttcgaatattgtcgcaagaagaggaaaaaggagaaaggtatgtttcagtttatccctttctatattaaagatagccaaccttatggagctgccgccttcaacgcttattgatggaatattaacaagtggaactggagaaatccaatatccagcacctcttctagagctatggatgagaagtatccaactcccccatgattcaccttctggaaggaacaccccgcctcagccaccagaaccctcatcatcatcaccatcacacagagttcatcatcaaggccctgcaggatttgtaagctactctgctaaaccttttatttttgcttcaggtggagccactgtaaatgaagtaagatccttccctggctcagcatctggacatggttccccatctcatacttcggaagtaaattcaggaaggttagtacatatatcatcaaatctattcaaagtgaagaaaaaaaatgcattgaaaattttcttttggagattgagaaacaacccatatgcttgttacagaatcaacaaaaaaaggccttattcttggtctagacacagtgggagtagccttgaaccagtggatgaggagcatccatttaaccatactgatccaaatttcaagttgtcaaaactatctgagcatgaactgttggtggaaacggggccaacacagactcaaaatccaatcatccctcccccaattgaaaagatcacggattcaatccgaatgcatctgaagacacattttgacacacccggagcgccccaaagagaatccctggaccagcttgcttccggaatggacagaccaagagctgctcaactcttctatcagacttgtgttcttgctactcgtggtttcataaaagttgaacaaaacgagccttacggggacattctcatctcaagaggagcaaagatgtaa

SEQ ID NO: 93 - protein, 612 aa, Vitis vinifera
MFYSHQLLARKAALGQIWRVAFYLLLLMAATMHAKMNRRKLDKLNIIKICEEILNPSVPMALRLSGILMGGVVIIYERKLMHCLEIGYLQVELNEAWKVKAGAGSHSTDLPKRKSQAKYEAVTLPDNEEGDAPEIERFLNFSNTATTCLDNVDETYITGNTGGEDVLQDNHQADADNITLWEPFNSYQADTNLNNRDERFEEDGEIQLNFTPAEQIPSTLIPSPSHQNEHQKGDPADEIQDLHPENQVNQQPDEHKEVNQVEQSEQDQPRQGIIRKRGRRPAAFVMDDEQIIIPGNLYQSWLQDPSNIVARRGKRRKVCFSLSLSILKIANLMELPPSTLIDGILTSGTGEIQYPAPLLELWMRSIQLPHDSPSGRNTPPQPPEPSSSSPSHRVHHQGPAGFVSYSAKPFIFASGGATVNEVRSFPGSASGHGSPSHTSEVNSGRLVHISSNLFKVKKKNALKIFFWRLRNNPYACYRINKKRPYSWSRHSGSSLEPVDEEHPFNHTDPNFKLSKLSEHELLVETGPTQTQNPIIPPPIEKITDSIRMHLKTHFDTPGAPQRESLDQLASGMDRPRAAQLFYQTCVLATRGFIKVEQNEPYGDILISRGAKM

SEQ ID NO: 94 - DNA, 1126 bp, Zea mays
atcccccgcaccgcacgtctcagcccacctcctcctaccaccctcgccgcggccgcgccacacaaaagcgtcacgccgtctgacagcggggaaaaaaaaggaggccatggaggagaacattcctcacccgagggaggcacaagggcccaccgtcgcccaaccggccccggcggtcgtcacgccccgcgacgacgctctagctcccgtagcccagctgctgtcgtcctcgggcgatgatgagtcgtccgacgacgagctggaggtcgacttcgagttcccgttcgtctgcagggactcccccgcgggcacggccgccccggccgacgagctcttcgcggacggccggatcagggccttctacccggtgttcggccgcggcacggccgggtgcgtcccccgtggcggcggcggcggcggcagcggcagctgctgcacggcgctgccggccgctccgccgcgggtgaggggccagctgggtcgcctgttccaggaggagacacgggagcgcagcacctccgccagctttacggcgtcgtccgggcccgccacggacgaggacggcggcctggatggcgcggcgccggggagctactgcgtgtggcgcccgggtccgtccgcgtccgcgtcgccctccccgccgccgccgccgccgcccaggaagagcgggtccacggggtccatggcgcggtggcgccgcatcagcgacctcgtcgtgggccgcagccacagcgacggcagggacaagttcgtcttcctcgccgccgcgcccaggagggggcccaaggacaaggagcctgccgccactgccccgcccgcggtcgccgcccaccagatggcggcggcgtacctcgccaggggcgtcccaccgcggcgcacgttcctgccgtaccgcgaggagctcgtgggcttcttcgccaacgtgaacggcatcagtcggagccaccaccgtccgccgttctgacgtcttgtcagtggcctattccatcggttaattaccctgattaattaattattcggtaacgtgattagcgcttttcttagcagtagtggataagtaggcggtctgtataggtaatgattttgggtggatcacgcgacgcgatgaatggagaggtgttttctgtcg

SEQ ID NO: 95 - protein, 602 aa, Zea mays
MFYSHQLLARKAPLGQIWMAATLHSKINRKRLDKLDIIKICEEILNPSVPMALRLSGILMGGVVIVYERKVKLLYTDVSRLLTEINEAWRIKPVTDPTVLPKGKTQAKYEAVTLPEINMVVEQPMFFSEPDGAKFRRMGLEDLDEQYVQVNLDDDDFSHADDRHQAKAVNITLVDNFESGLAETDLFNHFERFDIADDETTVNITPDEYPQVPSTLIPSPPRQEDIPQQEEPYYAAPSPVHGEPQQGGPEDQEEQKMKQPPKASKRKARWEVPRVIMDNNQMMIPGNIYQTWLKDASSLVSKRRKLNSNFNFIRSTKISDLMHIPPVALISHDNLFSELCYPKPLMQLWKDCTEVKSTKASSGGQRSSSQEPQPKNSPPQAGGEYEMETGGLPMDLTDGIEKLRANMSAKYDRAYNILHSDHSVTPGSPGLSRRSASSSGGSGSAFIQLDPEVQLPSGSGRSKRGQHSSARSLGNLDTVEEDFPLEQEVRDFKMRRLSDYVPTPDLLEETEPTQTPYERRSNPMDKITETIQSHLKLHFDTPGVPQSESLSHLAHGMTKARAARLFYQIAVLATCDYIKVTQLERKGDELYGDILISRGLKM

SEQ ID NO: 96 - DNA, 769 bp, Brassica napus
gacaattgtgaggtggacgacagcatcacaaacattaatccagccacactagaggcgaatgtagatatgcaaacaaaagaaaatgagggagatgttcccatgggtgaaagtgaagcaaacataaacactagaagaagagaaagttatgtagacaacctggcggaagatgcaccgggagaggatgcaagaatggatccttttactgtagaagatgaaaccattccatatcagcaagaagaatcctcgaaatctctaaacgcaactcgagaacaatacaacgcaatggatggattcattgaacatgaggagcatactcaaggacaacatggagaggaaaatgacaacacagacaccgctcgtggagttcaagtagaaaatgctcaggaagctcccagctcttcacccaaacagacaaataaacgaagcaagagaggagcttctgacagcaatatgaaaaagcggagcaaaacggtgcatgatgaaactgaaaaggacaagcaaacgaaaacattatcacgtgaaagtggagcaaagaagcaaaccaaaggaaaagcgaacgagagaaaggagaagacgcaaaagaaaacagtaacacgtgagagtaaaatgttctcccgtaggaaaagccttgcagctgctggtactaattgggaagctggtgttagacgaaagaacaaagggatttaagtcgagaccacttgaatacttggagaggtgaaagattcttgtacggacgttgtttcacgaaagtttaacctaatggatcggg

SEQ ID NO: 97 - protein, 206 aa, Brassica napus
MQTKENEGDVPMGESEANINTRRRESYVDNLAEDAPGEDARMDPFTVEDETIPYQQEESSKSLNATREQYNAMDGFIEHEEHTQGQHGEENDNTDTARGVQVENAQEAPSSSPKQTNKRSKRGASDSNMKKRSKTVHDETEKDKQTKTLSRESGAKKQTKGKANERKEKTQKKTVTRESKMFSRRKSLAAAGTNWEAGVRRKNKGI

SEQ ID NO: 98 - DNA, 707 bp, Brassica napus
ggaatcccaactttcccaaatactttcaaattgtaaaccgcacaacctctctccctctcagctgtaacccaatcggcggagaattaaccggtgaatcagatgtcggatctgggaagcgggagctcaactctagagtcggatcccctacatgcttactcaggtctctccttgtttcctcgcacgctgaaatcaatgtccatccctcctcctcaccactccgacgctcttcagcagacgcataccctccttcaatctatgccttttgaagtttcaaaagagcatgaggagcaggcaaagtctatcttagaagatgaaagctctgaacttttaaagaaaggcgttgggagcagtgtagcgtcagaagatacggatgttggtgtgaaccctatcgctaataagcgggaaagaagaccggcgtatgaacgtaagagaggacattttactttcaagcctacgacgacgactagtgaatcacctcaaaaagaaccaacctttgatcctagtaaatatcctaaacctggagattactttgctgcctatgacagattcctgcttgctcaacgagaatggcagaagcagactggcacctttgtgaaagagacacaccagtatcagccccgccctcgcagaccagaacttccagggagaaaacggggtgcatacaagcatacttatacaagtagttatcccattgacttgaaaacttc

SEQ ID NO: 99 - protein, 202 aa, Brassica napus
MSDLGSGSSTLESDPLHAYSGLSLFPRTLKSMSIPPPHHSDALQQTHTLLQSMPFEVSKEHEEQAKSILEDESSELLKKGVGSSVASEDTDVGVNPIANKRERRPAYERKRGHFTFKPTTTTSESPQKEPTFDPSKYPKPGDYFAAYDRFLLAQREWQKQTGTFVKETHQYQPRPRRPELPGRKRGAYKHTYTSSYPIDLKT

SEQ ID NO: 100 - DNA, 672 bp, Brassica rapa
gacaacctctctctctctcagctgtaacccaatcggcggagaaattaaccggtgaatcagatgtcggatctgggaagccggagctcaactctagagtcggatcccctacatgcttactcaggtctctccttgtttcctcgcacgctgaaatcaatgtccatccctcctcctctctaccattccgacgctcttcagcagacgcataccctccttcaatctatcccttttgaagtttcaaaagagcatgaggagcaggcaaagtctatcttagaagatgaaagctctgaacttttaaagaaaggcgttgggagcagtgtagcgtcagaagatacggatgttggtgtgaaccctatcgctaataagcgggaaagaagaccggcgtatgaacgtaagagaggacattttactttcaagcctacgacgacgactagtgaatcacctcaaaaagaaccaacctttgatcctagtaaatatcctaaacctggagattactttgctgcctatgacagattcctgcttgctcaacgagaatggcagaagcagactggcaccgttgtgaaagagacacaccagtatcagccccgccctcgcagaccagaacttccagggagaaaacggggtgcattacaagcatacttatacaagtagttatcccattgacttgaaaacttc

SEQ ID NO: 101 - protein, 195 aa, Brassica rapa
MSDLGSRSSTLESDPLHAYSGLSLFPRTLKSMSIPPPLYHSDALQQTHTLLQSIPFEVSKEHEEQAKSILEDESSELLKKGVGSSVASEDTDVGVNPIANKRERRPAYERKRGHFTFKPTTTTSESPQKEPTFDPSKYPKPGDYFAAYDRFLLAQREWQKQTGTVVKETHQYQPRPRRPELPGRKRGALQAYLYK

SEQ ID NO: 102 - DNA, 510 bp, Brassica rapa
tgtccgatctgggaagcgggagctcaactctagagtcagatcccctgcatgcttactcaggtctctccttgtttcctcgcacgctgaaatcaatgtccatccctcctcctcaccattccgacgctcttcagcagacgcataccctccttcaatctatcccttttgaagtttcaaaagagcatgaggagcaggcaaagtctatcttagaagatgaaagctctgaacttttaaagaaaggcgttgggagcagtgtagcgtcagaagatacggatgttggtgtgaaccctatcgctaataagcgggaaagaagaccggcgtatgaacgtaagagaggacattttactttcaagcctacgacgacgactagtgaatcacctcaaaaagaaccaacctttgatcctagtaaatatcctaaacctggagattactttgctgcctatgacagattcctgcttgctcaacgagaatggcagaagcagactggcacctttgtgaaagagacacaccagt

SEQ ID NO: 103 - DNA, 2250 bp, Glycine max
atggagaaagaaggtgatgcattagtggatcctctctccaactattggggactttccctctttcctcaaccatctttcccaccctccaaaccctacaactcagaccaagatcttcacaccatccacactcacctcagatccatggtaataattagagtttattttagctttaattgtagcatcaccttccatttcatgcatattgtgctttcacaggccttgcggagtcccgccaaactgaagacaaatgatgctgaaggggaatttcgtcgaaacccgagaccagggttagggcttaaacgtccacgcttctctatgaagccaactaagaaagtttgctaccaactctggaccttgatagcctcaaggatccggcggaattcttcttggctcatgaacggttggaaagtaagtcactgtttgtttcttatttctcttcctgtggacgacattgcaatccgcgtggcttgtttttattttatcttattggaaatacagaagcagctgggtggtgcctcatttgagtcagatcaggataatgtggccgctagaccacgacaacgtcgaccggggcttttggggaataatcaattgccaatcaagtacaagcatcggtatccaaaagaaacctctgatgatgttctgtcctctcaagagacattagggtctcagagtcttgctcctgtgaccgagaacactgacaaaggagaggctagtatggcatcatcagaaaaagaagtaatagattcatctggtacgaaagggattgagcttgatgaattgttggatggattgcttcattgtgattctgaagatctagagggggatggggcaattactcttttgcaggagaggttacagatcaaacccattgctttagagaaattttctgttccagacttcccagataagcaaatggttgatctgaaatctctgcaagggaacaagtcaaagccaaggaaggctttatccgatattgataatttgttgaaaggaatgagtatgaatatgaataagaagacacctcttaaaaaggctgtacagtgccctgtacagcaattagcttcacccacccctccaagaagtccatttgcttcgttgtcgttgttgcagaagcacatttcacagtcaaaacaatcaatggatcctttttcagctcatgaaattgatcacttatctagcaaaaactattccccaactcatatggtaaatccagaactcaatcttgttagatctgcgaacccgtcaaatgaattgaatgcacacatgattgaagatgctattgctgaagaaaaatctgggaagtcatcaaataaactgaatgcgccctcaattcaagatataattgcagtaggtgggactagtttggctgaggacacagtcagaaatggcaccagtacttctagaaagtccatggtggataattcaagggaacctaggtttgatgttaatattctctcaaatgaacctcatgacataaatggcacccacacttctgaagtttccaaggaagataattctgggaagtcatcaaataatctgaatgtgtccttgattgaagatataattgcagtttatgggacaagtttggcagaggacacaaccagaaattgtaccagtacttttaaaaaatccatggtggataattcgagggaacccaggtttgatgttactcttgactcaaatgaacctcattttattccattgaaaatccattggcttaggatgtgcttttctgctaaaaggctatgcagaattcgtttaacctgcagtagtaatgtacctttaatgacactaactctgttgtggtgcacattagctgatcaaccaaatcctgctggatatgaagctaattctgtggataaacgtgccagaagatcagatgatgatccagaacattgtttacaggaaaagacagatggttctatggtgcctgttaatggacaaaagagagttaagtcacttgtgcaaaaagtgtccaagaataaaaaactttcgaatagacacagccttgcagctgctggtacatcatggacttctggattaaggagaagcaccaggatcaggacaaggccattggaatactggaaaggggaaagactggtgtatggccgtgtacacaaaagtttggctactgtcattggggtcaagtgtatttcaccaggaagtgatggaaaaccgattatgaaggtgaaatcttatgtatcagataaacacaaagagcttttcgagttggcatctctatattga

SEQ ID NO: 104 - protein, 749 aa, Glycine max
MEKEGDALVDPLSNYWGLSLFPQPSFPPSKPYNSDQDLHTIHTHLRSMVIIRVYFSFNCSITFHFMHIVLSQALRSPAKLKTNDAEGEFRRNPRPGLGLKRPRFSMKPTKKVCYQLWTLIASRIRRNSSWLMNGWKVSHCLFLISLPVDDIAIRVACFYFILLEIQKQLGGASFESDQDNVAARPRQRRPGLLGNNQLPIKYKHRYPKETSDDVLSSQETLGSQSLAPVTENTDKGEASMASSEKEVIDSSGTKGIELDELLDGLLHCDSEDLEGDGAITLLQERLQIKPIALEKFSVPDFPDKQMVDLKSLQGNKSKPRKALSDIDNLLKGMSMNMNKKTPLKKAVQCPVQQLASPTPPRSPFASLSLLQKHISQSKQSMDPFSAHEIDHLSSKNYSPTHMVNPELNLVRSANPSNELNAHMIEDAIAEEKSGKSSNKLNAPSIQDIIAVGGTSLAEDTVRNGTSTSRKSMVDNSREPRFDVNILSNEPHDINGTHTSEVSKEDNSGKSSNNLNVSLIEDIIAVYGTSLAEDTTRNCTSTFKKSMVDNSREPRFDVTLDSNEPHFIPLKIHWLRMCFSAKRLCRIRLTCSSNVPLMTLTLLWCTLADQPNPAGYEANSVDKRARRSDDDPEHCLQEKTDGSMVPVNGQKRVKSLVQKVSKNKKLSNRHSLAAAGTSWTSGLRRSTRIRTRPLEYWKGERLVYGRVHKSLATVIGVKCISPGSDGKPIMKVKSYVSDKHKELFELASLY

SEQ ID NO: 105 - DNA, 1278 bp, Glycine max
atggcatcattggaaaaagaagtaatagattcatctggtactgaagggaacaagctcgatgaattgttggatggattgcttcattgcaattctgaagatctagagggggatggggcaatgactcttttgcaggagaggttgcagatcaaacccattgctttagagaaattttctgttccagacttcccagataagcaaatggttgatctgaaatctctgcaaggaaacaagtcaaaaccaaggaaggctttatccgatattgataatttgttgaaaggaatgaatatgaataagaagacacctcttaaaaaggctgtacagtgccctgggcagcaattagcttcacccacccctccaagaagtccatttgcttcgttgtcattgttgcagaggcacatttcacggtcaaaacaatcagtggatcctttttcggctcatgaaattgataacttatctagcaaaaactattctctaactcatacggtaaatccagaactcaatcttgctggatctgggaacctgtcaaatgaattgaatgcacacatgattgaagatgttcatgctgttggtaagacaagcacagttttggacacagacagaaatggcaccaatacttctgaaattcccaaggaagactattctgggaagtctaatattgaggcacacatgattgaagatgatattgctgttggtaagacaagtacagttttggacacagatataaatagcatccacacttctgaaatttccaaggaagataattctgggaagtcatcaaataatctgaatgtgccctcaattgacaatatagttgcagctgatgggacaagtttggctgaggacgctgccagaaattgtaccaatgttggagtcagtggtgtggctgatagggttatggatgacaccaaggacaggtcgaatatcgaggtaaatgaatcctgtcaatctgaagacaaaacatttacagcttctatcccaacagatgacacgaatcttaatgtactcaattcactagtgcactttacattttcttttcagcagttggctgctggtacatcatggacttctggattaaggagaagcaccaggatcagaacaaggccattggaatactggaaaggagaaagaccggtgtatggtcgcgtacaccaaagtttggctactgtcattggggtgaagtgtatttcaccaggaagtgatggaaaaccgattatgaaggtgaaatcttatgtatcaaataaatacaaagagcttttcgagttggcatctctatattga

SEQ ID NO: 106 - protein, 425 aa, Glycine max
MASLEKEVIDSSGTEGNKLDELLDGLLHCNSEDLEGDGAMTLLQERLQIKPIALEKFSVPDFPDKQMVDLKSLQGNKSKPRKALSDIDNLLKGMNMNKKTPLKKAVQCPGQQLASPTPPRSPFASLSLLQRHISRSKQSVDPFSAHEIDNLSSKNYSLTHTVNPELNLAGSGNLSNELNAHMIEDVHAVGKTSTVLDTDRNGTNTSEIPKEDYSGKSNIEAHMIEDDIAVGKTSTVLDTDINSIHTSEISKEDNSGKSSNNLNVPSIDNIVAADGTSLAEDAARNCTNVGVSGVADRVMDDTKDRSNIEVNESCQSEDKTFTASIPTDDTNLNVLNSLVHFTFSFQQLAAGTSWTSGLRRSTRIRTRPLEYWKGERPVYGRVHQSLATVIGVKCISPGSDGKPIMKVKSYVSNKYKELFELASLY

SEQ ID NO: 107 - DNA, 1887 bp, Medicago truncatula
atgccaatgtcagaggacgacttgggattctgtacagaaaattcaactcaagatgtgggaaatcatgattttgcttctcaagaggatggagaattacctcgaaaacggagacccggtttaggcctcaatcgtgcacgcccacgtttctcccttaagccgaccaaaaaaccctctgttgaggatttgttaccgattcttgacttgaaaaaactgacagatcccgaggaattcttcatggcccatgaacggttggaaaatgcaaaaagagaaatagaaaagcagttgggtattgtgtcatctcagccaagtcaggattcaactaaaccacgggaacgtcgaccgggacttcctgggtttaatcggaggccagttagatacagacatagggtttcaacagaagctttggtcaataatgatgatgtcctatcctcccaagaggcatttgaatccgacggtcttgatcctgttggtgataacactgacaaaggcaaattttctcttgcatcattggataatgaagtaactgattcaccagctattgaagagaataagatgaatgacattttgaaaggattgcttgattgtgattctgaagaacttgagggtgaaggagcaatgaatcttttgcaggagaggttacaggtcaaatcgattgttttcgagaaattatctgttccagacttcctagatatccaacctattgatctgaaatctttgcaagggactttgtcgaagccaagcaaaggaaaggctttttctgacgtagataattggttgaaaggaatgaatattcagacacctcttagacggagtgtaggatacgctgagaagcagttagcttcacccacaccaccaaaaagtccatttgcttcattgtcatcattacaaaagcacatttcacggtcaaagctatctacggatccattttcaactcatgaaattgaccttgtacctacaagaagctattcaccaattcacatggcagaccaggaagtcgatattgttggttctagtaagctgtcggatgagctgactgcacctacaaccgaagatgttattgctgctggtgagaaaaatacaattccggagacttctgaaaattccaaggaacacaattctaggaatccatcagatgaagttaatgcgcccataattgaagatattgtggacaatcctgacagaaattgcaccattactcctcaaaagtccatggttgataattcaaccgaacctgggtttaatgctaatgttgactcgaatgaacctgctgttgacatggatgtggatattggtcgtagtggtatgggaaaaagggttatggatgacacagaaggaaggcaaaatgttgagccaaatgaaccttttcattttgatgacaacacgctggaagaaaacatgcagggatttacaagttctataccaacagatgacgcgaatctgaacacggagcttccactagctgatcaatcaaatccagttacctatcaagccaattctatggacaaagggtctagaagatcagatgatggtccagaacagtgtttacaggaaaagacaattggttctgcggcacctgttaatgggcaaacaatagttaaatcatgtatgcgaaaagggtccaagggtaagagacttctgaggaagagccttgcagatgctggtacatcatgggagtctggagtaaggagaagcaccaggttcaggacaaagcctttggaatattggaaaggagaaagaatggtgtatggccgtgtacacgagagtttgagtactgtcattggggtgaagtgcatgtctcctggaagtgatgggaaaccaaccatgaaggttaaatcatttgtgtcagataaatacaaagagctttttgagatagcttctgaatattga

SEQ ID NO: 108 - protein, 628 aa, Medicago truncatula
MPMSEDDLGFCTENSTQDVGNHDFASQEDGELPRKRRPGLGLNRARPRFSLKPTKKPSVEDLLPILDLKKLTDPEEFFMAHERLENAKREIEKQLGIVSSQPSQDSTKPRERRPGLPGFNRRPVRYRHRVSTEALVNNDDVLSSQEAFESDGLDPVGDNTDKGKFSLASLDNEVTDSPAIEENKMNDILKGLLDCDSEELEGEGAMNLLQERLQVKSIVFEKLSVPDFLDIQPIDLKSLQGTLSKPSKGKAFSDVDNWLKGMNIQTPLRRSVGYAEKQLASPTPPKSPFASLSSLQKHISRSKLSTDPFSTHEIDLVPTRSYSPIHMADQEVDIVGSSKLSDELTAPTTEDVIAAGEKNTIPETSENSKEHNSRNPSDEVNAPIIEDIVDNPDRNCTITPQKSMVDNSTEPGFNANVDSNEPAVDMDVDIGRSGMGKRVMDDTEGRQNVEPNEPFHFDDNTLEENMQGFTSSIPTDDANLNTELPLADQSNPVTYQANSMDKGSRRSDDGPEQCLQEKTIGSAAPVNGQTIVKSCMRKGSKGKRLLRKSLADAGTSWESGVRRSTRFRTKPLEYWKGERMVYGRVHESLSTVIGVKCMSPGSDGKPTMKVKSFVSDKYKELFEIASEY

SEQ ID NO: 109 - DNA, 2897 bp, Oryza sativa
gggagctctccgccaccccgcgcggcggcgagatcgaggcgccgccgccgccgtatggcctcggctgatcccttcctagccgcatcgtccccggcgcacctcctcccccgaaccctcggccccgccgcgccgcccgggaccgccgcgtccccctccgcggcccgcggggcgctgctcgacggcatctcccgaccactgaaagggtccaaggagctagttgagcaggctagaatggcgatgaaggctgtcggggacatagggaagctctatggcggcgatggagcgggggtggctgccgccgctgcggatggcaagaacaaccagctggggagaaggcctgcgccggaccgcaagcgatttcggctcaagaccaagccccccgcgaacaaaccggtgcaaaatgtggactacacagagttactgaacattgaagatcctgatgaatactttttgaccctggaaaagctcgaaagagctgataaggagattaaaaggttaaggggtgaggttccaactgaaggaacatataataaccgaggcattgaaccacctaagctacgacctgggctgttgaggagaaaatcagtccattcttacaagtttagcgccagctctgatgccccagatgccattgaagcacctgcttcccaaacagaaactgtgacagaatcacagactacccaagatgatgtgcatggctcagctcatgaaatgacaacagagcctgtttcttcaagatctagccaagatgctataccagatatctcagcgagagaagattcatttgtttggaaggataacagtttcaccttgaattacttactctccgcattcaaagatctggatgaagacgaagaagaaaatttactccgaaagactttacagattaaagaaataagcataggaaaagtttgtctccctgacttcaatgttccaggtgacacgcctgcaagcaacactactgagcagaaaaatcccatgagtgatcatgcattagaaagaactgcacctggaagcaaccttgctcgaatttcacaattggagaaacgcatttttgttggagatgccctggaagataaacatgcagatctttcaaaagatgatgaatctgatgggtctccggaaagtctgctgtgtaaacaatcacctgtgcgacgttcatctgatgcagtgggtttgatgatcaatgagggctctactgcaatggagaccccaagtcctagcatcaaatctccagagcatgtgcttgaatctgaatcgaaccctccagatggtgtaacaacagatgaacagccaacagaaaattcaccaattggtgtggacagagatagtgaacttgtcaaagagaagggcacatcttccaggcatagtgtttcgttagaggaagatgttatgccaatagattgcacggtttctcctcccgatcatttggaaggtggctcgactgaagtgttgacgaacattacaagtagaaatgtatctccattgcatcatggagatggcaattctgaacatcaggaaatagttggaggtgatgtggcccaagataatccgatccatacactggaaacacccccagaagatactccacagaatcaatctgaaatacatcgtggaagcattgagaaactggcagttgataaaagcaacgcactctccccaagtcaagggaagcaacatagaggcaaaaataagaagcagccatcgaagagaggaaaaagagagacagataatccgatccatacatcagaaacacccccaatggatactaatccacagaatcaatctgaaatacatcgtggaagcattgagaaactggcagttgataaaagcaatgcactctccccaagtaaaggcaaggaacaaagaggcaaaaataagaagcagccatcgaagagaggaaaaagaaagacagacaacctgatccatacaccggaaatacccccagaagatacagacaacacagtacatacaccggaaattcctccagaagatacttatccacagaatcaatctgaaatacatcgtggaaacactgagaaactggcagttgatataaacaatgcactctccccaagtaaaggcaaggaacaaagaggaaacaataagaagcagccatcaaagcgacaaaaaagagcagcaggtgaggcaggtgatttggaaacacacgcaccaaactttgaaccagagattcaacctcatgtgcaggacacagatgttgagcaacagccagcttgtacaagccagtcaccatcaccgagtaatggtacgagtaaaaatgaagttcgaaagagaaataagaagcaagatttgaacagaagaaaaagcttggcagatgcgggtcttacttggcaagcgggtgttagacgaagcacacgaatacggtcaaaacctttgcagcattggcttggtgaaagatttatatatgggcgtatacatggaacaatggccacagtcatcggtgttaaatcattctctcctagtcaggaaggcaaaggcccattgagggtgaaatcctttgttcctgaacagttctcagatttgttagccgaatctgccaagtactgaggtcctggcccgggaaagtccctatcttcctttctttggacaagttgcattcttcgacatgcatggctcgcgcaacctgtgatctgttccgtatctatgtgttacttttgctgttaatttttcgtcatttgaggtgcttcctcctatattgtagagctaactctgtgtagaagtgtttgtatctgtggagttgcagtgtaatgcatacatgctatgaacttgcatacatgatttattttttttaaaaggaagctgctcggagtcggggcccgggactgcccattttcatttgtagctgttgtgtgttttcaaaaggtaatttcgcatga

SEQ ID NO: 110 - protein, 837 aa, Oryza sativa
MASADPFLAASSPAHLLPRTLGPAAPPGTAASPSAARGALLDGISRPLKGSKELVEQARMAMKAVGDIGKLYGGDGAGVAAAAADGKNNQLGRRPAPDRKRFRLKTKPPANKPVQNVDYTELLNIEDPDEYFLTLEKLERADKEIKRLRGEVPTEGTYNNRGIEPPKLRPGLLRRKSVHSYKFSASSDAPDAIEAPASQTETVTESQTTQDDVHGSAHEMTTEPVSSRSSQDAIPDISAREDSFVWKDNSFTLNYLLSAFKDLDEDEEENLLRKTLQIKEISIGKVCLPDFNVPGDTPASNTTEQKNPMSDHALERTAPGSNLARISQLEKRIFVGDALEDKHADLSKDDESDGSPESLLCKQSPVRRSSDAVGLMINEGSTAMETPSPSIKSPEHVLESESNPPDGVTTDEQPTENSPIGVDRDSELVKEKGTSSRHSVSLEEDVMPIDCTVSPPDHLEGGSTEVLTNITSRNVSPLHHGDGNSEHQEIVGGDVAQDNPIHTLETPPEDTPQNQSEIHRGSIEKLAVDKSNALSPSQGKQHRGKNKKQPSKRGKRETDNPIHTSETPPMDTNPQNQSEIHRGSIEKLAVDKSNALSPSKGKEQRGKNKKQPSKRGKRKTDNLIHTPEIPPEDTDNTVHTPEIPPEDTYPQNQSEIHRGNTEKLAVDINNALSPSKGKEQRGNNKKQPSKRQKRAAGEAGDLETHAPNFEPEIQPHVQDTDVEQQPACTSQSPSPSNGTSKNEVRKRNKKQDLNRRKSLADAGLTWQAGVRRSTRIRSKPLQHWLGERFIYGRIHGTMATVIGVKSFSPSQEGKGPLRVKSFVPEQFSDLLAESAKY

SEQ ID NO: 111 - DNA, 2271 bp, Setaria italic
atggacgctgccgaccccctccgtgccatctcctctccggcccgactccttccccggaccctcggccccgccgccaccgcggcctccccctcgaaggcccgcgaggtgctcctcgaggccatctcccgcgcccgactgctgaaaggatccaaggagctggttgagcaggccagaatggtattgaagggacacggggacatccggatgctctaccatgatgatggagtgaaagtcgccccccatgcaaatggcacgaaagaccagcagggaagaaggccaggaccagaccgcaaacggtctcggttcactcaaaaggcccatgaaaggaagctggtgcctgctgttgatcactctaacgtactgaagattaaggatccaaacgagtactataagaaattggatgatattgaagaagctgagaaggagataagacggttaaatggtgaggttgttgatgagatggtaatgaattttgatcctgtagtagaacccaagaggcgctctactttgctggggagaaaatcagtccgtactttcaagtttgctgatgctgatactcaagatccaactgaggtaccagcttcccaaacagaaactatgacaggatctcagctctcgcaagatgatgcgcatgcctcgtttgctgaaaaaaatgagcagtctgttcctccaagatctggccaatgtgctatttcagatgtttcagagaaagaagattcattagctgagaaggatggagatgatctgacttatgtactggcctcactcaaaaatctggatggatctgaagaggaagactttctccgaaagatcttaaagatgcgcaaaatagagaaagaaaatgtttgtctccacaactctgttcctgaagataggccacgaagaagcaatactgcacggaaaaaatcaatgagggttcctccagaaaatcctttgccccagagttgccagagtcgcgtttcagagttagagaaacatttatttcctggagttgcagggaatgataaatgtgcagatctacaggaagatgatgaatctgaaggttcaccagatattgtgatgggtgaacaatcattggtgcatgattcatctgatgttttggtgactgatgagacctttgctgcaagtgaaattgataaggagaccccaaatctgggtgtcaaagctgcagatcatgttattgatccagaaccaaacatgccagatcgtgcaggtgaaaggcaggcaggaggttccccacttggtttgtatactgcaagtgaatatgacagggagaccccaaatctgggggtcaaagctgcagaacatgttcttgatccagaaccaatcatgcctgatcatgcagatgaaaggcaagcagaaggttccccacttggtttgtacagcaatacagaagttgccaaagaaaaggctgcatgcagcaggagcgatatttctatggaagacaatgtgccaatagacaatcctactgatatgtctaataatgaaacagaagtttcttctcctcatcatttggagggcagcttggccgaagtgttggccaggacaccagttagaaatgtggcttcagatggtgttgatcagacttctcatgcagctgaggacaacattcaacatcttgaagcggttgaagaggatggtgttatacaagataagtcaagtcatccatccgaggtgcctctagaagatattgatccagtgaatcagcctcagatgcatgatggaaacaataagaaattggcagctgatctgagcaatgcagtgtccccaatcaaagagaagaagcgacaggcagctcgaaaaggaaaaaagaagcaacaatcaaagaggagccaaaaagtggcagatgaatctaaccacccactggaaatatcccaagcaaattttgattcggagaatcaatctcgtatggatgagaacattgagcaacagagagttgttacgagtagtgcactgtcgccaaacaaagctaaggggcaaaagggagctcaaatgagaaacaggaccaaacatttgaatcaaagaaaaagcctcggagatgctggccttgcgtggcagtctggagtgagaagaagcacaagaatccgctcaaggcctttggagcattggcgtggtgaaagatttgtatatgggcgcatacatgataccatggccacagttattggcatcaaagcatactctcctggtcaagatggcaagaaaactttgaaagtgaaatcctttgtgcctgaacagtattccgatcttgttgctgaatctgcgaagtactga

SEQ ID NO: 112 - protein, 756 aa, Setaria italica
MDAADPLRAISSPARLLPRTLGPAATAASPSKAREVLLEAISRARLLKGSKELVEQARMVLKGHGDIRMLYHDDGVKVAPHANGTKDQQGRRPGPDRKRSRFTQKAHERKLVPAVDHSNVLKIKDPNEYYKKLDDIEEAEKEIRRLNGEVVDEMVMNFDPVVEPKRRSTLLGRKSVRTFKFADADTQDPTEVPASQTETMTGSQLSQDDAHASFAEKNEQSVPPRSGQCAISDVSEKEDSLAEKDGDDLTYVLASLKNLDGSEEEDFLRKILKMRKIEKENVCLHNSVPEDRPRRSNTARKKSMRVPPENPLPQSCQSRVSELEKHLFPGVAGNDKCADLQEDDESEGSPDIVMGEQSLVHDSSDVLVTDETFAASEIDKETPNLGVKAADHVIDPEPNMPDRAGERQAGGSPLGLYTASEYDRETPNLGVKAAEHVLDPEPIMPDHADERQAEGSPLGLYSNTEVAKEKAACSRSDISMEDNVPIDNPTDMSNNETEVSSPHHLEGSLAEVLARTPVRNVASDGVDQTSHAAEDNIQHLEAVEEDGVIQDKSSHPSEVPLEDIDPVNQPQMHDGNNKKLAADLSNAVSPIKEKKRQAARKGKKKQQSKRSQKVADESNHPLEISQANFDSENQSRMDENIEQQRVVTSSALSPNKAKGQKGAQMRNRTKHLNQRKSLGDAGLAWQSGVRRSTRIRSRPLEHWRGERFVYGRIHDTMATVIGIKAYSPGQDGKKTLKVKSFVPEQYSDLVAESAKY

SEQ ID NO: 113 - DNA, 2085 bp, Sorghum bicolor
atgaatgccgccgaccccctctgcgccatctccttgcctgcgcgactccttccgcggacccttggccccgcctccgccaccgggccttccccctcgaaggccggcgacgcgctcctcgaggccatcgcagtctcccggtcgctgaaagggtctgaggagcttgttaagcaggctaaaatggtgctgaaggagcacggggacatccagcctctctaccatgatgatggagtgcaagtgaggccccctgtaaatggcagcaaagagcaacagggaggaaggccagcactgaaccgcaaacgggctagattcactatgaaggacactgcaagcaaaccgacgcctgttgtggatcaatctaagttgacgaatatttcagatccagtcgaatactttatgaccttggaccagcttgaagaagctcaggaggagatccaacggctaaatggcgcagcagaaaaatgcgtattaaaatttgatcctgtagatcaaccaaagagacagcctggtttatgtgggagaaaatcaatccgcagtttcaagataattggggatgctgatactcaagatcccattgaggtaccggcttcccaaacaacaactttgacaggatctcaggtctcacaggatgttgtgcatgctgttgctgacaaaaatgaacaatgtgttcgttcaagttctgctgaagctatttcagggaaagaagattcattaactcagaaggatggccgtgacgattttacttatttactgaactcactccaacatttggatgaatctgaagaggaagggtttatcctcaagaccttagggattggagagccaaggaaggaaagagttagtttccgtaactccattcctggagttaggtccctaagaagcaataatgaacaaaaaggttcaatgagggctcaccctttagaaagtcctttgcttcagcctcttcaggatcgaatttcagagttggagaaacatttatttcctggaggcgcagcagatgctaaatgcacagatgatgaatctgaaggttcaccagatattgcgatgggcgaaccatcattagtgcatgattcttctgatgttccgatggttgatgagaactttactggaagtgaaattgacagggagaccccaaatctgggtgccagagcagcagaccatattcttgatcctgaaccatccgatcatgcatatgaaaggcaacccggaggttcctcagttggtttgtgcagagacacagaagttgccaaagaaaacgaggcatgcaggaggagcaatatttctatggaggaagatgatgtgccaatagactatccaactattggcagatctaccagtgaaacagaagcttcttctcatcatctggagggaaggtcgacagaagaattgggtatcaataggactttacatacagctgaggatagcattcaacatctagaagtggtgaaagaaggtggtgttctacaagataagtcaagccagtcattggagatgcctctggaagatattgatccagtgaatcagcctcagatgcatggtggaagcactaagaaattggcacctgatttgtgcaatgcactgtccttaaccaaacagaagaagcaacaagcagcccaagaagggaaaatgaagaaacagtcaaagaggggcaaaaaagtggctgatgaatctagccttgcactggaaatatcacaagcaaatttggattcggagaatcaacctcataatgatgatcagaacattgagcaacatacagtgttgagtagcacactgtcgccaaaccacgataaggggcaaaagggagctcaaaggacaaacaagaccaaaaaactgaatcaaagaaaaatccttggagatgctggccttgcacagccgtctggagtgagaagaagcacaagaacacgctcaaggcctttggagcattggcttggtgaaagattactatatgggcctataaatgacactttgcctgcagttattggcatcaaatcatactctcctggccaagacggcaagaaaacattgaaagtgaaatctttcgtgcctgaccagtattcagatcttgtcgctaaatccgcgaagtactaa

SEQ ID NO: 114 - protein, 694 aa, Sorghum bicolor
MNAADPLCAISLPARLLPRTLGPASATGPSPSKAGDALLEAIAVSRSLKGSEELVKQAKMVLKEHGDIQPLYHDDGVQVRPPVNGSKEQQGGRPALNRKRARFTMKDTASKPTPVVDQSKLTNISDPVEYFMTLDQLEEAQEEIQRLNGAAEKCVLKFDPVDQPKRQPGLCGRKSIRSFKIIGDADTQDPIEVPASQTTTLTGSQVSQDVVHAVADKNEQCVRSSSAEAISGKEDSLTQKDGRDDFTYLLNSLQHLDESEEEGFILKTLGIGEPRKERVSFRNSIPGVRSLRSNNEQKGSMRAHPLESPLLQPLQDRISELEKHLFPGGAADAKCTDDESEGSPDIAMGEPSLVHDSSDVPMVDENFTGSEIDRETPNLGARAADHILDPEPSDHAYERQPGGSSVGLCRDTEVAKENEACRRSNISMEEDDVPIDYPTIGRSTSETEASSHHLEGRSTEELGINRTLHTAEDSIQHLEVVKEGGVLQDKSSQSLEMPLEDIDPVNQPQMHGGSTKKLAPDLCNALSLTKQKKQQAAQEGKMKKQSKRGKKVADESSLALEISQANLDSENQPHNDDQNIEQHTVLSSTLSPNHDKGQKGAQRTNKTKKLNQRKILGDAGLAQPSGVRRSTRTRSRPLEHWLGERLLYGPINDTLPAVIGIKSYSPGQDGKKTLKVKSFVPDQYSDLVAKSAKY

SEQ ID NO: 115 - DNA, 2318 bp, Zea mays
atggacgctaccgaccccctctgcgccatctcctcgactgcgcgactccttccgcggacccttggccccgcccccgccatcgggccttccccctcgaaggcccgcgacgcgctcctcgaggccatcgcactcgcccggtctctgaaagggtctgaggagctggttaagcaggctacaatggtgccgaaggaacacggggacatccaggctctctaccatgatgatggagtgaaaggcaggcctcctgcaaatggcagcaaagagcaacagggaagaaggccagcactggatcgtaaacgggctcggtttgctatgaaggacactggaagcaaaccggtgcctgttgtggatcaatctaagttatcaaatatttcagatccaatcacattcttcatgaccttggatcggcttgaagaagccgaggaggagatcaaacggctaaacggagaggcagaaaaacgcacattgaattttgatcctgtagatgaacccattagacagcctggtttacgtgggagaaaatcagtccgcagtttcaaggtaattgaggatgttggtactcaagatcccattgaggcaccggcttcccaaacagcaactatgacaggatctcagttgtcacaggatgttatgcatgctgttgcgggcaaaaatggacgatctgtttcctcaagatctagtgaagctatttcagagaaagaagtttcattagctgagaaggatggccgtgacgatttgacttatatactgacctcaatccaagatttagatgaatctgaagaggaagagtttatccggaagaccttagggattaaagaaacaaggaaggaaagagttggtcttcgtaactccattcttggagttaggtccctaagaagcaatactgaacaaaaaggttcaatgaaggtccaccctccagaaagtcatttgcctcagactcgccaagatcgaatttcagagttagagaaacatttgtttcctggaggtgcagcaaatgctaaatgcacagatgatgaatctaaagggtcaccagatattgtgatgggtgaaccatcattggtgcattattcttctgatgttctgatgactgatgagaactttactgcaagtgacgttgacagggagaccccaaatctgggtgccagagcagcagaccctgttcttgatcctgaaccaaacttgcctgatcatgcatatgaaaggcaacctggaggttcctcacttggtttgtacagagacacagaagttggagttgccaaagaaaatgagacatgtagcaggagcattatatctgtggaggaagatgatgtgccaatagactatataactattggcaggtctactgatgaaacagaagtttcttcttctcatcctttggagggtagctcgacagaagaattggtcactaaaccagttagacatgcggctccagatggtatctgtaggacttcacatgcagctgaggatagcattcaacatctagtaacggtcaaagagggtggtgtcctacaagataagtcaagccagttgttggagatgcctcaggaagatattaatccactgaatcaggctcagatgcatggtggaagcactaagaaatcggcacctgatctatccccgaccaaacagaagaagcaacaagcagttcaagaaaggaaaaggaagcaacagtcaaagaggggaaaaaagtggctgaaacagacaattacgagtagcacaccttcaccaaatggtgccaaggggcaaaagagagctcaaaggagaaaccagaccaaaaaaaggaatcaaagaaaaatccttggagatgctgaccttgcatgccagcctggagtgagaaaaagctcaagaacacgctcaaggcctttggagtattggcttggtgaaagattactatatgggcctatacatgacaatttgcatggagctattggcatcaaagcatactcccctggccaagatggcaagagatcattgaaagtgaaatctttcgtgcctgaacagtattcagatcttgttgctaaatctgcaaggtattgaagccaagattttccaaagaggatcacgccttgtgacctgttgctttgtcacctcactatgtgatgttgacatgtattggtagaactgcagtactgcacaacgaaatgcatgttaacttaggcaggtatcaaatggatgagtatctagtttggatgcgctactacccattcggctactcgctacgtggagtctaaggtgtcaattgacatttgcatgtatacatagtggtacttgatagtaagacagttttaggttcagactcttgaaaattgattttgttt

SEQ ID NO: 116 - protein, 678 aa, Zea mays
MDATDPLCAISSTARLLPRTLGPAPAIGPSPSKARDALLEAIALARSLKGSEELVKQATMVPKEHGDIQALYHDDGVKGRPPANGSKEQQGRRPALDRKRARFAMKDTGSKPVPVVDQSKLSNISDPITFFMTLDRLEEAEEEIKRLNGEAEKRTLNFDPVDEPIRQPGLRGRKSVRSFKVIEDVGTQDPIEAPASQTATMTGSQLSQDVMHAVAGKNGRSVSSRSSEAISEKEVSLAEKDGRDDLTYILTSIQDLDESEEEEFIRKTLGIKETRKERVGLRNSILGVRSLRSNTEQKGSMKVHPPESHLPQTRQDRISELEKHLFPGGAANAKCTDDESKGSPDIVMGEPSLVHYSSDVLMTDENFTASDVDRETPNLGARAADPVLDPEPNLPDHAYERQPGGSSLGLYRDTEVGVAKENETCSRSIISVEEDDVPIDYITIGRSTDETEVSSSHPLEGSSTEELVTKPVRHAAPDGICRTSHAAEDSIQHLVTVKEGGVLQDKSSQLLEMPQEDINPLNQAQMHGGSTKKSAPDLSPTKQKKQQAVQERKRKQQSKRGKKWLKQTITSSTPSPNGAKGQKRAQRRNQTKKRNQRKILGDADLACQPGVRKSSRTRSRPLEYWLGERLLYGPIHDNLHGAIGIKAYSPGQDGKRSLKVKSFVPEQYSDLVAKSARY

SEQ ID NO: 117 - DNA, 2806 bp, Zea mays
gaaaaatttaggggtaacggttgcggatagccttacccttccccatcctcactctcccgtcatccagcctagtagcctaccgtttcaatttttgaactcccggtccggcaaccctccccagccagcgttccactcactccggcatcgcttcgaatctccgcgcggcggcgggaccgcgtgaccgacgcgcggcgctgccccttcagaaagccgcatggacgccgccgaccccctctgcgccatctcctcgactgcgcgactccttccgcggacccttggccccgccattgggccttccccctcgaacccccgcgacgcgctcctcgaggccatcgcactcgcccggtctctgaaagggtctgaggagctggttaagcaggctacaatggtgccgaaggagcacggggacatccaggctctctaccatgatgatggagtgaaaggctggcctcctgcaaatggcagcaaagagcaacagggaagaaggccagcactggatcgtaaacgggctcggtttgctatgaaggacactggaagcaaaccggtgcctgttgtggaccaatctaagttatcaaatatttcagatccaatcacattcttcatgaccttggatcggcttgaagaagccgaggaggagatcaaacggctaaatggagaggcagaaaaacgcacattgaattttgatcctgtagatgaacccattagacagcctggtttacgtgggagaaaatcagtccgcagtttcaaggtaattgaggatgttggtactcaagatcccaatgaggcaccggcttcccaaacagcaactatgacaggatctcagttgtcacaggatgttatgcatgctgttgcgggcaaaaatggacgatctgtttcctcaagatctagtgaagctatttcagagaaagaagtttcattagctgagaaggatggccgtgacgatttgacttatatactgacctcaatccaagatttagatgaatctgaagaggaagagtttatccggaagaccttagggattaaagaaacaaggaaagaaagagttagtcttcgtaactccattcttggagttaggtccctaagaagcaatactgaacaaaaaggttcaatgaaggtccaccctccagaaagtcatttgcctcagactcgccaagatcgaatttcagagttagagaaacatttgtttcctggaggtgcagcaaatgctaaatgcacagatgatgaatctgaagggtcaccagatattgtgatgggtgaaccatcattggtgcattattcttctgatgttctgatgactgatgagaactttactgcaagtgacgttgacagggagaccccaaatctgggtgccagagcagcagaccctgttcttgatcctgaaccaaacttgcctgatcatgcatatgaaaggcaacctggaggttcctcacttggtttgtacagagacacagaagttggagttgccaaagaaaatgagacatgtaacaggagcaatatatctgtggaggaagatgatgtgccaatagactatataactattggcaggtctactaatgaaacagaagtttcttcttctcatcctttggagggcagctcgacagaagaattggtcactaaaccaggtagacatgcggctccagatggtatctgtaggacttcacatgcagctgaggatagcattcaacatctagaagcggtcaaagagggtggtgtcctacaagataagtcaagccagttgttggagatgcctcaggaagatattaatccactgaatcaggctcagatgcatggtggaagcactaagaaatcggcacctgatctatccccgaccaaacagaagaagcaacaggcagttcaagaaaggaaaaggaagcaacagtcaaagaggggcaagaaagtggctggtgaatccctggaaataccccaaacaaattttgaatcggagaatcaacctcataatgacgatgtcaacattgagaaacagacaattacgagtagcacactctcaccaaatggtgccaaggggcaaaagggagctcaaaggagaaaccagaccaaaaaaaggaatcaaagaaaaatccttggagatgctgaccttgcatgccagcctggagtgagaaaaagctcaagaacacgctcaaggcctttggagtattggcttggtgaaagattactatatgggcctatacatgacaatttgcatggagctattggcatcaaagcatactctcctggccaagatggcaagagatcattgaaagtgaaatctttcgtgcctgaacagtattcagatcttgttgctaaatctgcaaggtactgaagccaagattttccaaagaggatcacgccttgtgacctgttgctttgtcacctcactatgggatgttgacatgtattggtagaactgcagtactgcacaacgaaatgcatgttaacttaggcaggtatcaaatggatgagtatctatctagtttggatgcgctactacccattcggctactcgatacgtggagtctagggtgtcaattgacattggtacttgatagtaagacagttttaggttcagactcttgaaaattgattttgtttgtcttctcgttttcagatttaagatgcgataccacagataaaaatcttgggtaattggaggtaaaaaaaaggatagcacacctaaatatcataatgatgttatgatttttttattcagtgttatggctcatgccgtcaaggtatcatgtggtgtgatagtatcttgatgttaagatctgtggcgtcgatgccaatatttatagcaccaagctttaat

SEQ ID NO: 118 - protein, 701 aa, Zea mays
MDAADPLCAISSTARLLPRTLGPAIGPSPSNPRDALLEAIALARSLKGSEELVKQATMVPKEHGDIQALYHDDGVKGWPPANGSKEQQGRRPALDRKRARFAMKDTGSKPVPVVDQSKLSNISDPITFFMTLDRLEEAEEEIKRLNGEAEKRTLNFDPVDEPIRQPGLRGRKSVRSFKVIEDVGTQDPNEAPASQTATMTGSQLSQDVMHAVAGKNGRSVSSRSSEAISEKEVSLAEKDGRDDLTYILTSIQDLDESEEEEFIRKTLGIKETRKERVSLRNSILGVRSLRSNTEQKGSMKVHPPESHLPQTRQDRISELEKHLFPGGAANAKCTDDESEGSPDIVMGEPSLVHYSSDVLMTDENFTASDVDRETPNLGARAADPVLDPEPNLPDHAYERQPGGSSLGLYRDTEVGVAKENETCNRSNISVEEDDVPIDYITIGRSTNETEVSSSHPLEGSSTEELVTKPGRHAAPDGICRTSHAAEDSIQHLEAVKEGGVLQDKSSQLLEMPQEDINPLNQAQMHGGSTKKSAPDLSPTKQKKQQAVQERKRKQQSKRGKKVAGESLEIPQTNFESENQPHNDDVNIEKQTITSSTLSPNGAKGQKGAQRRNQTKKRNQRKILGDADLACQPGVRKSSRTRSRPLEYWLGERLLYGPIHDNLHGAIGIKAYSPGQDGKRSLKVKSFVPEQYSDLVAKSARY

SEQ ID NO: 119 - DNA, 2551 bp, Zea mays
gtcactcactcgggagtcactctcccgtcctgatgccccgtttcaatttttgaactcccgatctggcaatccccacccacgctcccgagcaactttctactcactccggcgtcgcttcgaatcccagcgcggcggcgtgacgcgtgaatgcgtgatcgacgcgcggcgctgctcctccgggaaaccgcatggacgccgccgaccctctctgcgccatcacctcgcctgcgcggctccttccgcggacccttggccccaccccctcgaaggtccgcggtgcgctcctcgaggccatcgcactcgcccggtcgcggggtctgaggagctggttaagcaggctgcaatggtgctgaaggagcacggggacatccagactctctaccatgatgatgcaatgaaagccatgccccccacaaatgtcagcaaagggcaacagggaagaagggcagcactggatcgcaaacgggctcggttcactatgaaggacactggaagcaaagcggtgcctgttgtggatcgatctaagttattgaatatttcggatccagtcgcattcttcatggccttggatcggcttgaagaagctgaggatgagatcaaacggctaaatggagaggcagaaaagcgcatattgatttttgatcctttagacgaacccattagacagcctggtttgcgtgggagaaaatcattccgcagtttcaaagtaactgaggatgctactactcaagatcccattgaggtactggcttcccaaacagcaactatgacaggatctcagttctcacaggatgttatgcatgctgttgctgacaaaaatgaacagtctgttccttcacgatctggtgaagctatttcagatgtttcaggaaaagaagattcattagctgagaaggatggccgtgatgatttggcttatttactgacctcgatccaagatttggatgaatctgaagaggaagcatttatccggaagaccttagggcttaaagaaataaggaagggaagagttagtctctgtaactccattcctggagtcaggtccttaagaagcgatactgaacaaaaaggttcaatgaaggttcgccctccagaaagtcatttgcctcagactcgccaagatcgaatttcagagttggagaaacatttatttcctggaggtgcagcaaatgctaaatgcacagatgatgaatctgaagggtcaccagatattgtgatgggtgaaccatcattagtgcatgattcttccgaggttctgatgaccaatgagaactctactggaagtgaaattgacaggaggaccccaaatctgtgtgccagagcagcagaccacgctcttgatcctgaaccaaacttgcctgatcatgcatacgaaaggcaaaccagaggctcctcacttggtttgtgcaaaaacacagaagttgccaatgaacacgaggaagatgatgtacacatagaatatccaactactggcgggtctacttatcaaacagaagtttcttctcatgatttggagggcagcttgacagaagaattggtcagtgaaccaggtaggcatgcggctccagatgatatctataggacttcacatgcagctgaggatagcattcaacatctagaagtggtcaaacagggtggtgttctacaagacaagtcaagccagtcgttggagatgcctctggaagatattgatccactatatcggcctcagatgcatggtggaagcactaagaaatcgacacctgttctgtgcaatgcactgtccccgatcgaacagaagcaacaagcagctcaagaagggaaaaggaagcaacaggcaaagagggtaaaaaaagtgtctgatgaatctagccatgcactggaaatatcccaagcaaatttcgaaccggagaatgaacctcataatgttgacgtgaacatggagcaaccgacagttatgagtagcgccaaggggcaaaagggagctcaaaggagaaacaagaccaaaaaattgaatcaaagaaaaatccttggagatgttgaccttgcgcggcagtctggagtgagaagaagctcaagaatacgctcgaggcctttggagtattggcttggtgaaagattactatatgggccgatacaggacactttgcctgcagttattggcatcaaagcatactctcctggccaggatggcaagaaaacattgaaagtgaaatctttcgtgtctgaacagtattcagatcttgtcgctcaatttgcgaagtactaaacaagacaccatttttctaagaggatcacgccttgtgacttgttgctttgtcacctgactttatgatgttacatgtgttggtggaaccatagtactgcacaatgaaaaggcacacgtcctaccgaatggttgccagtatctatcttgtttggatgccatttcggctattcgatcggtggagtgtagcgtatgtgcagcggtatcacattagggatcgattcggataggcatggaatccaatagacataacattatttatcatattttaattcgaatttagatacgaatgtagattttatcgtt

SEQ ID NO: 120 - protein, 634 aa, Zea mays
MVLKEHGDIQTLYHDDAMKAMPPTNVSKGQQGRRAALDRKRARFTMKDTGSKAVPVVDRSKLLNISDPVAFFMALDRLEEAEDEIKRLNGEAEKRILIFDPLDEPIRQPGLRGRKSFRSFKVTEDATTQDPIEVLASQTATMTGSQFSQDVMHAVADKNEQSVPSRSGEAISDVSGKEDSLAEKDGRDDLAYLLTSIQDLDESEEEAFIRKTLGLKEIRKGRVSLCNSIPGVRSLRSDTEQKGSMKVRPPESHLPQTRQDRISELEKHLFPGGAANAKCTDDESEGSPDIVMGEPSLVHDSSEVLMTNENSTGSEIDRRTPNLCARAADHALDPEPNLPDHAYERQTRGSSLGLCKNTEVANEHEEDDVHIEYPTTGGSTYQTEVSSHDLEGSLTEELVSEPGRHAAPDDIYRTSHAAEDSIQHLEVVKQGGVLQDKSSQSLEMPLEDIDPLYRPQMHGGSTKKSTPVLCNALSPIEQKQQAAQEGKRKQQAKRVKKVSDESSHALEISQANFEPENEPHNVDVNMEQPTVMSSAKGQKGAQRRNKTKKLNQRKILGDVDLARQSGVRRSSRIRSRPLEYWLGERLLYGPIQDTLPAVIGIKAYSPGQDGKKTLKVKSFVSEQYSDLVAQFAKY

SEQ ID NO: 121 - DNA, 851 bp, Brassica napus
caaaaaaggcgaagcggtgttcgattcaatgaacttgaatcctcagcttttcctcaacgaaacactcaacaccgtcgaggacattgtcggcgaggcttttgacttctatacactcgaagcatccaatctcctcaaaatcgatggacgagctgataataataggtcacgggagttagcgaaaggtattgatcgtgttcgtggtatgattcaatcggttctggaagaccgcttgaggatgtgggaagcctactgtcttcgatacacttttgcagttcctgaagattttgtgctgcctgagagtgatgcccaaaatatccaacctttgccaaatgaccaagacttggatgcggaattggattccctaaggcgtaagcttcttttggtacgaaacaggtctgttgagcttaactcggagctccaggctttggaaagaagatctgtttcaaatgaactgtctgcaagactcgttaatgaagtttcaaagctttatgatgaatcatccgtgaacgatatgtccaaagagatgacaaaagttgcatcagaacttcgcgcagcgatcaataggctcaaaacaccaagaacgaatgctgctgaaacagctacaggggagaggctaaagaacaatggaattgattttccggcaacggctctcggtggaaagattgaagagcttgacaaatttctggccgagttaagaaagatgtgaaaatgttacaacattcgcctttgaactctgccgttttgtaaactactagcttggcttgaaacactacgttgtttttgacttaccaaatggccacttctccgcatttcaaatgtttgttttgtaacatacaaaatgatcctacgca

SEQ ID NO: 122 - DNA, 658 bp, Brassica napus
gagggttggaagaaactaaacggagggagaagaatggaaggcagcaaagggcaagcggtgttcgattcaatgaacttgaatcctcagcttttcataaatgaaacactcaacaccgtcgaggacattgtcggcgaggcttttgacttctatacactcgaagcatccaatctcctcaaaatcgatgataataggtcactggagttagcgaaaggtattgatcgtgttcgtggtatgattcaatcggttctggaagaccgcttgaggatgtgggaaacctactgtgttcgatacacttttgcagttcctgaagattttgtgctgcctgagagtgatggccaaaatatccaacctttgcctaatgaccaagagttggatgctgaattggattccctaaggcgtaagcttcattcggaacgaaacaggtctgttgagcttaactcggagctccaggctttagaaagaagatctgtttcaaatgaacagtctgccatactcgttaatgaagtttcaaagctttttgatgaatcatcggtgaacgatatgttcaaagagatgacaaaagttgcatcagaacttcgcgcagggatcaataatctgaaaacaagaagaatgaaggctgctgacggagctacagtacagaacaatggaaatgattttt

SEQ ID NO: 123 - protein, 208 aa, Brassica napus
MEGSKGQAVFDSMNLNPQLFINETLNTVEDIVGEAFDFYTLEASNLLKIDDNRSLELAKGIDRVRGMIQSVLEDRLRMWETYCVRYTFAVPEDFVLPESDGQNIQPLPNDQELDAELDSLRRKLHSERNRSVELNSELQALERRSVSNEQSAILVNEVSKLFDESSVNDMFKEMTKVASELRAGINNLKTRRMKAADGATVQNNGNDF

SEQ ID NO: 124 - DNA, 693 bp, Brassica rapa
atggaaggcagcaaagggcaagcggtgttcgattcaatgaacttgaatcctcagcttttcataaatgaaacactcaacaccgtcgaggacattgtcggcgaggcttttgacttctatacactcgaagcatccaatctcctcaaaatcgatgataataggtcactggagttagcgaaaggtattgatcgtgttcgtggtatgattcaatcggttctggaagaccgcttgaggatgtgggaaacctactgtgttcgatacacttttgcagttcctgaagattttgtgctgcctgagagtgatggccaaaatatccaacctttgcctaatgaccaagagttggatgctgaattggattccctaaggcgtaagcttcattcggaacgaaacaggtctgttgagcttaactcggagctccaggctttagaaagaagatctgtttcaaatgaacagtctgccatactcgttaatgaagtttcaaagctttttgatgaatcatcggtgaacgatatgttcaaagagatgacaaaagttgcatcagaacttcgcgcagggatcaataatctgaaaacaagaagaatgaaggctgctgacggagctacagtacagaacaatggaaatgatttttgggcaacggctcccgatgcaaagattgaagagcttggcaaatttctggccgagttaaaaaagatgtga

SEQ ID NO: 125 - protein, 230 aa, Brassica rapa
MEGSKGQAVFDSMNLNPQLFINETLNTVEDIVGEAFDFYTLEASNLLKIDDNRSLELAKGIDRVRGMIQSVLEDRLRMWETYCVRYTFAVPEDFVLPESDGQNIQPLPNDQELDAELDSLRRKLHSERNRSVELNSELQALERRSVSNEQSAILVNEVSKLFDESSVNDMFKEMTKVASELRAGINNLKTRRMKAADGATVQNNGNDFWATAPDAKIEELGKFLAELKKM

SEQ ID NO: 126 - DNA, 750 bp, Glycine max
atggaagggagtgagagtgaggccgtgtttggtgctctttatctgaacccgcaactcttctgtaacgaagttctcaacatcatcgacgatgtgctccaagaagctttcaatttcttcttccaggacgcatcgaggaagctcaacatcgaaagcacccaaaggtcccagcttctgaaaaagggtgttgattgcgttcggcagagagttcaatctgttttggacaaaaagcttgctacttgggagagttacatccttcgtcactgttttgctcttccccaaggttttcgtgtgccaaacacagatgatgcaaatgagaatgctcttgattcaggcgctccttttgatccagatatagatgcccagttggattcattgagagaaaaactaattgaggtggggaaggagtctgaaatgcttaatcaagaaattcaagcattagaaagaaagtctattgtcaatgcagctggacatatcaatgaagctgtacaattgtatgagcaaaattcaatgcatgaggtgtttcaggagattgtgacgaccgcctcagaacttggaacgaagatgggaaagctaaactccagcatgattgaagagactgaccaaacaaaaactaaaaggatttacagcacacaaatggatccatctgctataaatcctgttaaaggcctctcaaacatgaagttagacgatgttgaagaattttgtaagtgttatgaagagtatgtgaacttgtctttttcatcaatctag

SEQ ID NO: 127 - protein, 249 aa, Glycine max
MEGSESEAVFGALYLNPQLFCNEVLNIIDDVLQEAFNFFFQDASRKLNIESTQRSQLLKKGVDCVRQRVQSVLDKKLATWESYILRHCFALPQGFRVPNTDDANENALDSGAPFDPDIDAQLDSLREKLIEVGKESEMLNQEIQALERKSIVNAAGHINEAVQLYEQNSMHEVFQEIVTTASELGTKMGKLNSSMIEETDQTKTKRIYSTQMDPSAINPVKGLSNMKLDDVEEFCKCYEEYVNLSFSSI

SEQ ID NO: 128 - DNA, 726 bp, Glycine max
atggaagagggtgacagtgaggccatttttggtgctcttaatctgaacccgcaactcttctgtaacgaagttctcaacattgtcgacgatgtgctcgacgaagctttcaatttcttctaccaggacgcatccacgaagctcaacatcgaaggcacccaaaggtcccaggatctgaaaaagggtgttgattgcgttcggctgaatgttcaatctgttttggacaaacaacttgctgcttgggagagttacatcctccgtcactgttttgctcttccccaaggttttcgtatgccaaacaccgatgaatcaaatgagaatgccctagatccaggtgctccttttgatccagatatagatgcccagttagattcattgagagaaaaactaattgaggtggggaaggagtctgaaatgcttaatcaagaaatgcaagcattagaaagaaagtctgctgtcaatgtggctggacatatcaatgaagctgtacaattatatgagcaaaattctatgcatgaggtgtttcaggagattgtgacgaccgcctcagaacttggagcaaagatggcaaagctaaactctagcatgattgaagagactgaccaaacaaaaactaaaaggatttacagcacagaaatggatctatctgctataaatcctgctaaaggcctgtcaaacatgaagttagacgatgttgaagaatttgtaagtgttatgaagagtatgtga

SEQ ID NO: 129 - protein, 241 aa, Glycine max
MEEGDSEAIFGALNLNPQLFCNEVLNIVDDVLDEAFNFFYQDASTKLNIEGTQRSQDLKKGVDCVRLNVQSVLDKQLAAWESYILRHCFALPQGFRMPNTDESNENALDPGAPFDPDIDAQLDSLREKLIEVGKESEMLNQEMQALERKSAVNVAGHINEAVQLYEQNSMHEVFQEIVTTASELGAKMAKLNSSMIEETDQTKTKRIYSTEMDLSAINPAKGLSNMKLDDVEEFVSVMKSM

SEQ ID NO: 130 - DNA, 732 bp, Medicago truncatula
atggaaggaagtgagagcgaggccgtttttgaatcggtgatgaatctgaatccacaactcttcttcaacgaagttctcaacaccgttgacgatttcttcatcgatactttcgatttctacttccaggaagcatccaccaagctcaatgctgaagctactcaaagatcccaacatctcacacagggtgttgattgcattcgacaaaaggttcaatctgttttggatcaaaagctcactgtttgggaaaaatactgtctttatcactgtttttctcttccccaaggctttcaattaccaaacactctcaatggtgaaagaagtgcgaatgacattaatcctggttctacttccgatctagaactagatgctcagttagaatcattgaggaaaaaactagctgaggtggggaaagagtctgaaatgctgaatcaagaaattcatgcattagagagtcagtcttctcacaatgctcggtatatcaacgaggcagtacaattatttgagcaaaactcttacactgagttgtttcaggagattatgacaaccgcctcagaacttcaactcaagataggaaagctaaccaccaacaagattgaagggaccggaaaaatgaaagcaaaaaggattgacaacaataaaatggacatttctgctatatatgcttctaaaggcctctctaatacaaaatttgaagatcttcaagaatttgtaactcttatgaagagtacttga

SEQ ID NO: 131 - protein, 243 aa, Medicago truncatula
MEGSESEAVFESVMNLNPQLFFNEVLNTVDDFFIDTFDFYFQEASTKLNAEATQRSQHLTQGVDCIRQKVQSVLDQKLTVWEKYCLYHCFSLPQGFQLPNTLNGERSANDINPGSTSDLELDAQLESLRKKLAEVGKESEMLNQEIHALESQSSHNARYINEAVQLFEQNSYTELFQEIMTTASELQLKIGKLTTNKIEGTGKMKAKRIDNNKMDISAIYASKGLSNTKFEDLQEFVTLMKST

SEQ ID NO: 132 - DNA, 750 bp, Medicago truncatula
atggcgggaatggaaggaagcatgagcagcgagagcgatgcgattttcgaatcggtgatgaatttgaatccacaactcttcttcaacgaagttctcaacactgttgatgatttcgtcctcgatactttcgatttctacttccaggaagcatccaccaagctcaatgctgaagctactcaaagatcccaacatctcacacagggtgttgattgcattcgacaaaaggttcaatctgttttggatcaaaagctcactgtttgggaaaaatactgtctttatcactgtttttctcttccccaaggctttcaattaccaaacactctcaatggtgaaacaagtgggaatgacattaatcctggttctacttctgatccagaattagatgctcaattagaatcattgaggaaaaaactagctgaggtggggaaagagtctgaaatgctgaatcaagaaattcatgcattagagagtcagtcttctcacaatgctcggtatatcaacgaggcagtacaattatttgagcaaaactcttacactgagttgtttcaggagatcatgactaccgcctcagaacttcgaatgaagatgggaaagcttaacaccaacatgattgaagagacaggaaaagtgaaagcaaaaaggattgacaacaataaaatggacatttctgctatatatgcttccaaaggcctatctaatacgaaattcgaagatcttcaagaatatgtaactcttatgaagagcacgtga

SEQ ID NO: 133 - protein, 249 aa, Medicago truncatula
MAGMEGSMSSESDAIFESVMNLNPQLFFNEVLNTVDDFVLDTFDFYFQEASTKLNAEATQRSQHLTQGVDCIRQKVQSVLDQKLTVWEKYCLYHCFSLPQGFQLPNTLNGETSGNDINPGSTSDPELDAQLESLRKKLAEVGKESEMLNQEIHALESQSSHNARYINEAVQLFEQNSYTELFQEIMTTASELRMKMGKLNTNMIEETGKVKAKRIDNNKMDISAIYASKGLSNTKFEDLQEYVTLMKST

SEQ ID NO: 134 - DNA, 1108 bp, Oryza sativa
ctcccaaaaagtggccgcggaaaatttcgaattccccccacccgtcgtcggcggcgaccgcgggtgcccaagcccaaccccccgccgccgctcccctcgccgtccgccgacccacaccaccaccactcaggaccccctcataccaggcatggaggagagcgacgagaccgccgtggaggcggcgctggggctgagcgcctcgttcttcgtcaactcggtcctcaacgcggtcgacgacgtccgctacggggccttcgagtactgcctccaggaaggcgcccccgaggccgtcggcgccgccatggcgacccagaaggccgaggagctggagcggggtgtaatcagcattcacaacttggtgaaggatgtattggataagagaatgagcaattgggagaaatactgccttcgacattgtttcgcaatacctgaaggattcctgacacgtgaagatgatattcctgcaaaaaaatcactcaatgatgggaattctgattcggatctcgatgctgaacttgtttctcttaggaaaaaacttgaagatgctaacaatgaatctgaagaacttcaaaaagagctttcttccttagaaagacaagctgagtgccagagaaatttggattcctctatggctgaattattgaaggtgtttgaaagcaaggcctttcaagacaattttcaagatcttgtgaacgtaataccactatttcagcggaaactggaaggtatgaaaaggaagattgttgagaacattgacgatcaaattgattggaacgtcaatggacaccacaagcggttagcatcaggtttcactgccagaacagaagacagtcaagatgttgtgaatgtcttaaagaagtattagtagctcccacttttatgcgacctgtgcgataacaggacgcctgctatgtgctatccttcgtagcacgggataagctggttatatgtttggactcttgctaactgagtaccgccaatgcagatcttcaatgtaatcctgaactgcgattccttccgaacaatttgtacgtaaacgtaaagtacatgggctttccataattggtttatacgtggttatttctccggatggccggatagaaccact

SEQ ID NO: 135 - protein, 238 aa, Oryza sativa
MEESDETAVEAALGLSASFFVNSVLNAVDDVRYGAFEYCLQEGAPEAVGAAMATQKAEELERGVISIHNLVKDVLDKRMSNWEKYCLRHCFAIPEGFLTREDDIPAKKSLNDGNSDSDLDAELVSLRKKLEDANNESEELQKELSSLERQAECQRNLDSSMAELLKVFESKAFQDNFQDLVNVIPLFQRKLEGMKRKIVENIDDQIDWNVNGHHKRLASGFTARTEDSQDVVNVLKKY

SEQ ID NO: 136 - DNA, 841 bp, Sorghum bicolor
atggaagacggcgacgagagcgccgcgtcggcggcggaggcggcgctggggctgaatccgcagcttttcgtcgacgaggtccacggcatcattgacgacatcagagccggggccttcgagtactgcctccaggcagcggccgcaccaggggtcctcggcgccgccagggctgcagagaaggccactgatctccagcggggattaaatgctattcaccatgtcgtaaaggatcgactggataagagaatggccaactgggagaaattctgcttactgcattgcttcaatgtacccgaaggttttgtggctgctgaagatgatatttcttgtgcaaaagaatcacacaaagatgacacttcagatttggatttggaaattgactccttgaggagaaagcttgaaagtgctaacatggagtctcaaaatcttgaaagagagatgtcgtcattggaaaggcaaactacatacagaacaaaacttgattcttctgtctctgagatacaaaagttgcttgaagactctgtgcaggaaaattttgaaggtcttgtgaaggcaataccggtattgcagcagaaagtaatagatatgagcaagaaaaggatggcgaccacatgtttggtagatcaacaggtttggaacatgaacaatttgacagacaacaagcgacaaacactggataagagttttactgcacgtgctgaagacattcaagatgtcatcagtaccttacagaacaagagtcttgtggggccgccattactcctacagggagcgcaggatcagggccgcagacacctagatggcgccagcaacagcaacattccagggaacagcaagaagg

SEQ ID NO: 137 - protein, 291 aa, Sorghum bicolor
MEDGDESAASAAEAALGLNPQLFVDEVHGIIDDIRAGAFEYCLQAAAAPGVLGAARAAEKATDLQRGLNAIHHVVKDRLDKRMANWEKFCLLHCFNVPEGFVAAEDDISCAKESHKDDTSDLDLEIDSLRRKLESANMESQNLEREMSSLERQTTYRTKLDSSVSEIQKLLEDSVQENFEGLVKAIPVLQQKVIDMSKKRMATTCLVDQQVWNMNNLTDNKRQTLDKSFTARAEDIQDVISTLQNKSLVGPPLLLQGAQDQGRRHLDGASNSNIPGNSKKARVKRIKDGKK

SEQ ID NO: 138 - DNA, 735 bp, Vitis vinifera
atggaaggcagcgaaagcgaagccatttttgaatctctaaacctcaatccccagctcttcatcaatgaagtccttaacctagtcgatgatttgcttgatggagcttttgatttctatcaacaggaagcatcgaatcttttgagaacggacggaaccgatcgctctggtgatataaacaagggtattggttatattcgtaatatgattcaaggagttttggataagcggctggagatgtgggagaagtattgcctaagacactgttttgctgttcctgagggattcttgatgcctaaagctagtgaaacacctggtgacagttcaattaacaaagatgtgctgtctggtctcgagctggatgcgcagttggattcattgagggataaacttacagtggttgcaaaggaatctgctgagctgaacagagagctccaagcattggaaaggcagtctgtcttaagcaatcaatgtactgggtctgttaatgaggcattgcagttatatgaacaaaacaaagtgcatgacatgtttcaggagatgatgagaactgcatcagaacttcgtactaaaatggagaagatgaagaccaagaggatggaagggattgaacgtgttaaaacagagaggatatacaacccagacagagatttgtctatgaggaatcgtgacaaaggcctattcaatgcagagttggaagatcttcaagaatttttagccaacataaagaacatgtga

SEQ ID NO: 139 - protein, 244 aa, Vitis vinifera
MEGSESEAIFESLNLNPQLFINEVLNLVDDLLDGAFDFYQQEASNLLRTDGTDRSGDINKGIGYIRNMIQGVLDKRLEMWEKYCLRHCFAVPEGFLMPKASETPGDSSINKDVLSGLELDAQLDSLRDKLTVVAKESAELNRELQALERQSVLSNQCTGSVNEALQLYEQNKVHDMFQEMMRTASELRTKMEKMKTKRMEGIERVKTERIYNPDRDLSMRNRDKGLFNAELEDLQEFLANIKNM

SEQ ID NO: 140 - DNA, 1279 bp, Zea mays
agcagtttctcaaacactggccgagcgcaaaatttgaaaaccaaccctcaacctcaatcggggtgccggcgtccgacgaagtcgacgggccatccccattccccacccggcagtcggcagtccccacaccccaagacctctgaagagtcggaagaagaagcgggcgatggaagacggcgacgagagcgcggccgcggcggcggcgctggggctgagcccgcagcttttcgtcaacgaggtccacggcatcatagccgacatcagcgccgaggccttcgagtactgtctccaggcagcagccgcgccaggtgtcgtcggcgccgccacggctgcagagaaggccacggatctccagcggggattaaatgctattcaccatgttgtaaaggatcgactggataagagaatgaccaactgggagaaattctgctatcgacattgcttcgatgtacctgaaggttttgtggccgctgatgatgatagttcttgtgcaaatgaatcacaaaaagatgggatttcggattcagatttggatttggaacttgactctttgaggagaaagtttggaagtgctaacaaggaatctgaaaaccttgaaagagagttgtcctcactggaaaggcaagctacgttcaaaagaagacttgattcttctgtctctgagatagaaaagttgtttgaagaagaaatggtgcagggaaatttgaaagatcttgtgaaggcaataccggttttgcaccagaaaataatagatgcaaatcagagaaggactgagattaggagcttggtagatcaacaggcttggaacacgaagagatcgagagacagcaagccataagcgctggagaagagtactgccagttcccactttccctcttcagttctcccgtgtataattaattaattatgttctctcgtgtatagttatgccatgtatttatatgccagtaaggcggtaaccaataacttatgtagcaggttctactgcatgtgttgaagacattcaagaggttgtcaacatcttacagagcaagtagcttgttgctcttttcctgattcatgttggttccacatagcgcctgcagcttgcttgcttggataaagcagtggtttgcccagttagtcttgttattgatcaaccgctattatttgatactggctccgtcccaaaatattagtcgttttagtattttaccagattcatatcatactcagtgtatgtcttttacatatgtctagattcattgttatttatttaaatatagacataaaattggtg

SEQ ID NO: 141 - protein, 223 aa, Zea mays
MEDGDESAAAAAALGLSPQLFVNEVHGIIADISAEAFEYCLQAAAAPGVVGAATAAEKATDLQRGLNAIHHVVKDRLDKRMTNWEKFCYRHCFDVPEGFVAADDDSSCANESQKDGISDSDLDLELDSLRRKFGSANKESENLERELSSLERQATFKRRLDSSVSEIEKLFEEEMVQGNLKDLVKAIPVLHQKIIDANQRRTEIRSLVDQQAWNTKRSRDSKP

SEQ ID NO: 142 - DNA, 1446 bp, Zea mays
gatcataatgaacatctttacaacatatggatgatgatgtaatgtcagaatcaagttgtcttagtttctttttgtttaatgagaaattggaaggatagcgacgattccaaagtccgaacagagctagtttctcccgagcgcaaattttgaaaaccctcaacccggcactccgcactcagatctgcctgccaggcccccccacaaatccacaatccaaccgcacaagactcggaagaagaagcggggtgatggaagacggcgacgagagcgcggcggcggcgctggggctgagcccgcagcttttcgtcaacgaggtccacggcatcatcgccgacatcagcgccgaggccttcgagtactgtctccaggcagcggccgcaccaggggtcgtcggcgccgccaaggctgcagagaaggccatggatctccagcggggattaaatgctgttcaccatgtcgtaaaggatcgactggacaagagaatggccaactgggagaaattctgccttcgacattgcttcgatgtacctgaaggttttgtggccgatgaaaatgatagttcttgtgcaaaagaatcacacaaaaatgggacttcagattcagatttggatttggaacttgactccttaaggagaaagctcgaaagtgctaacaaggagtctgaaaatcttgaaagagagatgtcgtcattggaaaggcaaagtatgcacaaaagaaaacttgattcttcaatctctgagatacaaaagttgtttgaagacaagttaatgcagggatttgaagaccttgtgaaggcaataccggcattgcggcagaaaataatagatatgaacaagaaaaggactgagatcaggtgtttggtagatcaacaggtttggaacacgagcagtgtgagaggcaacaagcgacaaacactggataagggttttactgcatgtggtgtagacactcgagaggtcgtcagtatctttgagaacatgtagcttgttgttctttacctgattcatgttgcttacccatagtgcccgcagcttgcttgcttggagcttttccccagtcttgttattgattgacaccagatattatttgggctaattcaattcaagaatgactggagatattattggccatctggcacaggtaaatgctacatgtaattgcttccagaagcatactagattggaaatgtaatccttcctgcggctacttgtctacctctggtcgagagattttctgaactgcttcggtcatcatagttcttttagcatacagtatgtggtataacttgtcctgtacatgagaaaggaacattaagcagctgctacatatatctgagaagtttcccattttatgttacaactagtatggtgcacatgtgttgcaacgaaacacaaactatttgttaaatgcttatgacctaagcatgtctatgtttttgaagcggca

SEQ ID NO: 143 - protein, 244 aa, Zea mays
MEDGDESAAAALGLSPQLFVNEVHGIIADISAEAFEYCLQAAAAPGVVGAAKAAEKAMDLQRGLNAVHHVVKDRLDKRMANWEKFCLRHCFDVPEGFVADENDSSCAKESHKNGTSDSDLDLELDSLRRKLESANKESENLEREMSSLERQSMHKRKLDSSISEIQKLFEDKLMQGFEDLVKAIPALRQKIIDMNKKRTEIRCLVDQQVWNTSSVRGNKRQTLDKGFTACGVDTREVVSIFENM

SEQ ID NO: 144 - DNA, 1279 bp, Brassica napus
  misc_feature (1246)..(1246): n is a, c, g, or t
ccgggcgaggattcggacgaggcaacctgcggaccgaagcataaaaaaaaaaaaaaaaaagaaagaagaaaaatgatgtcagcgaacgactacccgaagttctctcgctccgatatcatcaccgtcctcagggaggctaacatcgcttccgtcaaagacgccgatctcaaaaaccctaccttcgattccgtctccgacctttacaccaggatcctcatctatctcgacgtcctcaccgaagaagagagaggccaggttgatttcgaggctctggagcaactggagaatccagatcaccacaccacgtcagctccggctatggatctttacgtcaaactcaaacacacgctagagatggtggattgtccactaaacatcaatttcaaggatctgctacgcccagactcatcccgaaccgagtttttcatcagtgctcttttgaactatgctctacacaaggattcgaaaatggagcttataagaccacttgcagaagagttgactcttcttgatgagcaacggaggcagtctgaggccaagattgctcagttgaaagcagagattgctgagtttgaggaagccgaggaaagggattcgccttttgttcaagagctggaagtgggcatcgaagaactcagtcacaaaatagcacaactcaataatgagcagctttcactacgagctacgtttcacaagctgagagaggagtctgcagagatggataacaagatttcgaaagcagagtttgaccttgtgcaagctgtccaagaaaacgcaaacttacgctcactaattgttcagtccccagacaaattgcagggtgctttagaagagaagaaacttgttctcgaggaaactaagaaagctgaaagattagcaatggaaactttcgaggagaaggctgctattcttgaggtttatgaaaaggcattcaagaaaatgtcaaagtcatctgcgcaactgcaattaattaacgaacaggtaaccaatgtcaaagcaattgagaaagacctaaaagctcagaaagctaagctgaatgaggatgaggcattgtacaaatctcttgaggcgaaagtggttgagcgagaaagaacagtgaaacagttgcacgaatcactaaagcagctagagaaggagaaacaagtcatgtttgatgattggacgaaacaactgaatgagttaaaactagaagttgaatccagaagacgtctgcttgaatccaggcaaaatgatgttgaatcagtantagctatggttgatgagaatactgccaaggcta

SEQ ID NO: 145 - protein, 402 aa, Brassica napus
  misc_feature (392)..(392): Xaa can be any naturally occurring amino acid
MMSANDYPKFSRSDIITVLREANIASVKDADLKNPTFDSVSDLYTRILIYLDVLTEEERGQVDFEALEQLENPDHHTTSAPAMDLYVKLKHTLEMVDCPLNINFKDLLRPDSSRTEFFISALLNYALHKDSKMELIRPLAEELTLLDEQRRQSEAKIAQLKAEIAEFEEAEERDSPFVQELEVGIEELSHKIAQLNNEQLSLRATFHKLREESAEMDNKISKAEFDLVQAVQENANLRSLIVQSPDKLQGALEEKKLVLEETKKAERLAMETFEEKAAILEVYEKAFKKMSKSSAQLQLINEQVTNVKAIEKDLKAQKAKLNEDEALYKSLEAKVVERERTVKQLHESLKQLEKEKQVMFDDWTKQLNELKLEVESRRRLLESRQNDVESVXAMVDENTAKA

SEQ ID NO: 146 - DNA, 1083 bp, Brassica napus
  misc_feature (33)..(33): n is a, c, g, or t
tggaagtggccatcgaagaactcagtcacaaantagcacaactcaataatgrgcagctttcactacgagctacgtttcacaagctgagagaggagtctgcagagatggataacaaggttaagctattcatcatgtgcttgtgttatcagtctgagaggcgtttttctagctattaacatgtgtattacagatttcgaaagcagagtttgaccttgtgcaagctgtccaagaaaacgcaaacttacgctcactaattgttcagtccccagacaaattgcagggtgctttagaagagaagaaacttgttctcgaggaaactaagaaagctgaaagattagcaatggaaactttcgaggagaaggctgctattcttgaggtttatgaaaaggcattcaagaaaatgtcaaagtcatctgcgcaactgcaattaattaacgaacaggtaaccaatgtcaaagcaattgagaaagacctaaaagctcagaaagctaagctgaatgaggatgaggcattgtacaaatctcttgaggcgaaagtggttgagcgagaaagaacagtgaaacagttgcacgaatcactaaagcagctagagaaggagaaacaagtcatgtttgatgattggacgaaacaactgaatgagttaaaactagaagttgaatccagaagacgtctgcttgaatccaggcaaaatgatgttgaatcagtagtagctatggttgatgagaatactgccaaggctaaccaggtgaaacagtcaggacaagctaaagtgaaacagttagcagataaatatgaggagatcgtgaagcagtttcatgagtacacggtgaagtttggagcggttctgccaagcttataagaggggaagaaaggtttgactgagtcgagtgatggtagaaagagattttaatttcaaactaaattattgtgattgtatcaagcttcgaaaatgttaatttagttatgcttgttttttgagttttcggcatttgcacgctggagaaactcatcacggtctctcacaattattttggactagtggtctgcgggatgtcgtcttttgtaactatgcgttgttggatc

SEQ ID NO: 147 - DNA, 1290 bp, Brassica rapa
atgatgtcagcgaacgactacccgaagttctctcgttccgatatcatcaccgtcctcagggaggctaacatcgcttccgtcaaagacgccgatctcaaaaatcctaccttcgattccgtctccgacctttacaccaggatcctcatctatctcgacgtcctcaccgaagaagagagaggccaggttgatttcgaggctctggagcaactggagaatccagatcaccacaccacttcagctccggctatggatctttacgtcaaactcaaacacacgctagagatggttgattgtccatttaacatcaatttcaaggatctgctacgcccagactcatcccgaaccgagtttttcatcagtgctcttttgaactattctcttcacaaggattcgaaaatggagcttataagaccacttgcagaagagttgactcttcttgatgagcaacggaggcagtccgaggccaaggttgctcagttgaaagcagagattgctgagtttgaggaagccgaggaaaaggattcgccttttgttcaagagctagaagtgagtatagaagaactcagtcacaaaatagcacaactcaataatgagcagctgtcactacgagctacgtttcacaaactgagagaggagtctgcagagatggataataagatttcgaaagcagagtttgaccttgtgcaagctgtccaagaaaacgcaaacttgcgctcactgattgttcagtccccagacaaattgcagggtgttttagaagagaagaaactagttctcgaggaaacaaagaaagctgaaagattagcgatggaaactttcgaggagaaggctgctattcttgaggtttatgaaaaggcattcaagaaaatctcaaagtcatctgcgcaactgcaattaattaacgaacaggtaaccaatgtcaaagcaattgagaaagacctaaaagctcagaaaactaagctgaatgaggatgagacattgtacaaatctcttgaggcgaaagtggttgagcgggaaagaacaggcaagccttggtctatatatctgccctctttagagataatgtttctcaattttgttgttcgcggagagactgtaatgttacattctttcaacagtgaaacagttgcacgaatcactaaagcagttgatgagaatactgccaaggctaaccaggtgaaacagtcaggacaagctaaagtgaaacagttagcagataaatatgaggagatcgtgaagcagtttcatgagtacacggtgaagtttggagcggttctgccaagcttataa

SEQ ID NO: 148 - protein, 429 aa, Brassica rapa
MMSANDYPKFSRSDIITVLREANIASVKDADLKNPTFDSVSDLYTRILIYLDVLTEEERGQVDFEALEQLENPDHHTTSAPAMDLYVKLKHTLEMVDCPFNINFKDLLRPDSSRTEFFISALLNYSLHKDSKMELIRPLAEELTLLDEQRRQSEAKVAQLKAEIAEFEEAEEKDSPFVQELEVSIEELSHKIAQLNNEQLSLRATFHKLREESAEMDNKISKAEFDLVQAVQENANLRSLIVQSPDKLQGVLEEKKLVLEETKKAERLAMETFEEKAAILEVYEKAFKKISKSSAQLQLINEQVTNVKAIEKDLKAQKTKLNEDETLYKSLEAKVVERERTGKPWSIYLPSLEIMFLNFVVRGETVMLHSFNSETVARITKAVDENTAKANQVKQSGQAKVKQLADKYEEIVKQFHEYTVKFGAVLPSL

SEQ ID NO: 149 - DNA, 1386 bp, Glycine max
atggcggagtcgaattacgagtacccaaggctacggcggccggaaatagtcacaatcctagcgcagttgcagatcgcgaacgtgaccgagcaggacttcaccaaccctaaccctgatttcatctccgatctctacactcgcgtcctcattcatctcgacattctcctcgaggaagacaacgagcaactcgagttccacgccctagagcatcttgaaaaccctgatttccacctggattccgttcgcgccgtgaaactctacaaccagatcaacgaggttctcacgacactcgagtgtccgcgcaaattcaccctcgccgatcttctcatgccggatcctcaccgaaccgacctcttccttggctctcttctcaatttttgtctcgatagggacgcgagaatgaactccgtctcggaaattgtggaggaagtgaacgctctagaggcgcagcgaacggagttggaggagaataggattttgcagttgaaagcggaaatttcggaatgcaatgaggcgaaggagagggagatgcctcttgttgaggaggtggaggccaaagttaaagagctcaagcaaacgattgcggtgctgaacagcaaccagagttctctgagaagtactttgaggaagttgaaggagaagaccggggaaacggatgagaagatttcaaatgctgaatttacattggtacaaaatgtccaagaaaatgcaaatctacgttcaaaaatcagtcaatcacctgataaagtacagagggctttagaggaaaagaaattagctcgtgaggaggcaaggaatgctgaaagattagcaatgcaagcttttcatgagaagactgcccttgttgaagttttttccaaggtgtacaagaaaatgtcaaaacacaacaagctgatgcaggatatacaagaacaggtaaattctgctaaatctattgaaaaggatcttaaagcattgaaggctaaacttagtgatgaagaaatattggagaagtcacttgaggccaaattggttgaaaaacagagtaaagttgagcagatggaagaatcgaggaagcaattggagaaagagtccaatattatgtgggaagaagcaactaaatacttaagtagtacgaaatcagatgttgaatctaagagatctgctacagaaacaaggcagaaaaatgttgaggctgttttatctgaggtggatgccataagtagtaaaattatatcagtaaaagaagctggagcagttaaagtggcactgttagtgcgcaaatgtgaagagctagtagaagcgtttcacaactatgcgaatccgattgcacgcgtgattgaatctgagcaaagaagactcggggccactaaaggaggtggatttggcatttcagatccggtttaa

SEQ ID NO: 150 - protein, 461 aa, Glycine max
MAESNYEYPRLRRPEIVTILAQLQIANVTEQDFTNPNPDFISDLYTRVLIHLDILLEEDNEQLEFHALEHLENPDFHLDSVRAVKLYNQINEVLTTLECPRKFTLADLLMPDPHRTDLFLGSLLNFCLDRDARMNSVSEIVEEVNALEAQRTELEENRILQLKAEISECNEAKEREMPLVEEVEAKVKELKQTIAVLNSNQSSLRSTLRKLKEKTGETDEKISNAEFTLVQNVQENANLRSKISQSPDKVQRALEEKKLAREEARNAERLAMQAFHEKTALVEVFSKVYKKMSKHNKLMQDIQEQVNSAKSIEKDLKALKAKLSDEEILEKSLEAKLVEKQSKVEQMEESRKQLEKESNIMWEEATKYLSSTKSDVESKRSATETRQKNVEAVLSEVDAISSKIISVKEAGAVKVALLVRKCEELVEAFHNYANPIARVIESEQRRLGATKGGGFGISDPV

SEQ ID NO: 151 - DNA, 1041 bp, Medicago truncatula
atgtcgaactacgaatacccacgtcttggtcgatcagaaataatcctaaccctctcccaattcgaaatcgaaaccgtcgccgatcaccaaatctccaaccctagacccaacttcattctacatctctacaaccgcatcctcaaccaccttgattttctacttgatgaagacaatcatcaacttgatttcaatgcagttgagcatctcgaaaatcctgatcttcacgttggatcggttcctgttatcaaggtgtataataagatcaaggaaatgcttaatactcttgaatgtcctaagaaatacacgtttaacttggctgatcttgttaagcctgatcctcatcgtaccgagttctttctcggtgctcttctcaatttctgtctggacagagctgggagaatgaattccatagaaaaatatgtagatgaattcaacgccttggaacagaagatagtggagattaaggagaataagattacgcagttgaaactggcgattgctgaatcctttgaagcgagagaaagggagatgccatttgttcaggaggtggatgcaaaagttaaagagctgcgtcaaactattccaaacctgaacaacaaacagatgtcgttgacgactaatttaaagaagttgaaggaggagaatgtggaaatggatgaaaagatttctgatgctgaatatagactgatccaaaatgttcaagagaatgcaaatttacgttcgaaaattgctcaatcacctgataaaatgttcgtgctgtggctttccttgtcttgcataaagagggctttagaggaaaagaaattagctcgagacgtggcaagaaattctgaaagattagccatgcacaatttccacgagaagactgccctcgttgaagtattttccaaggtatacaaaaaaatgtcaaagcacaacaaacaagtgcaggctatgcaagaacaggccaattctgctaaatcaattgaaaaggatcacagagcattaaaagctaaggttggtgatgaagacgtaccggagaagtcacttgaggccaaatag

SEQ ID NO: 152 - protein, 346 aa, Medicago truncatula
MSNYEYPRLGRSEIILTLSQFEIETVADHQISNPRPNFILHLYNRILNHLDFLLDEDNHQLDFNAVEHLENPDLHVGSVPVIKVYNKIKEMLNTLECPKKYTFNLADLVKPDPHRTEFFLGALLNFCLDRAGRMNSIEKYVDEFNALEQKIVEIKENKITQLKLAIAESFEAREREMPFVQEVDAKVKELRQTIPNLNNKQMSLTTNLKKLKEENVEMDEKISDAEYRLIQNVQENANLRSKIAQSPDKMFVLWLSLSCIKRALEEKKLARDVARNSERLAMHNFHEKTALVEVFSKVYKKMSKHNKQVQAMQEQANSAKSIEKDHRALKAKVGDEDVPEKSLEAK

SEQ ID NO: 153 - DNA, 828 bp, Medicago truncatula
atggcgatgtcgaactacgaatacccaaggcttcgccggccagaaatagttcaactcctaaacaactttcaaattgctaccgttacagagaacgacatctccaaccccagaaccggcgtcgttttggatctctacactcgcatcctcaactacctcgattttctccacgacgaagacaacggacagcttgatttcgatgcactagagcatctcgagaatcccgaccttcacgttggatctattcatgctatcaagctttacaacaagatcaaggaaatgcttaacttacttgaatgtcctaagaaatacacatttaactttgccgatcttctcaaacccgatcctcatcgaaccgagtttttccttggagctcttctcaatttctgtctcgacagggatgggagattgaatgcgatatcagaaatcgtagacgaattcaacgcgttggaacagaagatagttgagattgaagagaataatattacacagttgaaattggcgattgctgaatgcaatgaagcgagggaaagggaattgccttctgttcaggaggtggatgcaaaagttaaagagttgcgtcaaactattgcgaacctgaacaataaacagatgtcattgagaagtacaataaagaagttgaaggagaagactgtggaaatggatgataagatttctgatgctgaatataaactggtacaaaatgttcaagagcatggaaatctactttcaaaaattgctcaatcgcctgataaagtacaggactgcccttacctctgtgtggttaccacagtggaaaactctcgcgactcacaaccttctcttgggtag

SEQ ID NO: 154 - protein, 275 aa, Medicago truncatula
MAMSNYEYPRLRRPEIVQLLNNFQIATVTENDISNPRTGVVLDLYTRILNYLDFLHDEDNGQLDFDALEHLENPDLHVGSIHAIKLYNKIKEMLNLLECPKKYTFNFADLLKPDPHRTEFFLGALLNFCLDRDGRLNAISEIVDEFNALEQKIVEIEENNITQLKLAIAECNEARERELPSVQEVDAKVKELRQTIANLNNKQMSLRSTIKKLKEKTVEMDDKISDAEYKLVQNVQEHGNLLSKIAQSPDKVQDCPYLCVVTTVENSRDSQPSLG

SEQ ID NO: 155 - DNA, 1813 bp, Oryza sativa
gcatttcatttttttttttgccttcgaaattcctcgcatttggtttcccttgttgatttgggggaacggcggcggcggcgagagagcggctgcggcggcgacggcggcggcgaagaagaagatggcgtccaacttctcgttccctccgctggcgccggagcagatagcggaggcgctgcacacctacggcctcgcccccaccgccaacctccgcgcggaggacatcgccaacccgcagccggatctcctccccgccgtcatctccaacttccttgccaccgtcgtcgaccccaccggcgccgacgacctcgacgggcagctagggttcgacgcgctggcgtcgctcgacaacccggagcactatagggagggcatccgggtcctccgcctccacaagagggccaacgctttcctcgagtccatccagttccccgggttcacgctccgcgacctcctccgcccagacccgcgccgcctcgtgcaagtcctcagcgccctcatcaacttcctctactacagggacgagaagctcgccctcctgcagcccatcatccatgagttccccaacttggatgaacggtgcatggagctcaatgccaagattgccgagcatcagaaggcaatcgccgatcaagagctcgccgcgcaaatggaggtgcctatggttcagcagctagaggcggaggtcaattccctgaagcaaaaacttgtagagtacaacaaaaagcagctggcactgagggccaacgccactgcgatcaatgacaagaaagaggagacccacagaaagattgccaaaagcgattttgagttggtgaaactagcccaagaaaattccaagttattgtcaaaaattgttcagtccccagaaaagcttcagagggcccttgaagagaagaaaacagctcgtgctgagttgaagaatgctgagaagatagcaatgcaaagtgtacaagagaaaactgccactttggagatatacagtaagggttatgaaaaattgtcgaagcattcttctaaaatccaggctttacaagaacagtttactgcaactaaagcccttgagaaagaagtcaaagcgcgcaaagctaagattagtgatgaaagtgttgaaattatggcccttgacacaaagactattgaatgggatgggaaagtgcatgaaatggaggagcgtgttaaagctaaagaaaaagaaagggatcaaatagtagcagacgaaaatcagaagctggctgctttgaggtctgaagttgaatggaaactcaagtgtcttgaacctcgtgaaaggaaagtagaggaaacaattgcaaaggctactaaactatgtgcggaggttgattcaacaaggactgatgctgcagaagaactgcggctgatatatgctaaatttcaacaaattggacatgcctttacttgctacaaggacaattttaagactttcttggaacaagttgatgaggtgagcaaagaaactttagaaagtttaggtcgccaagctgtggagccattggacacatctgcaacattgtcgattgagaaagagaactcctgcggccccgctccctgaaaagaggatagccaattggagaagatagctagggtgttttgcgccactgttgtaaatttggaattgagctgtttttgttatcactggtgacagttatgctctgtttgaacctcatctgaccaattcggtgagaatacttcatcatcgaatcatctgcagtcgttatgtaaaaaaatcttgagtcactctgatatggaaatgttggtgtcaggttgccaagtaaaaactttggattatctgtcc

SEQ ID NO: 156 - protein, 482 aa, Oryza sativa
MASNFSFPPLAPEQIAEALHTYGLAPTANLRAEDIANPQPDLLPAVISNFLATVVDPTGADDLDGQLGFDALASLDNPEHYREGIRVLRLHKRANAFLESIQFPGFTLRDLLRPDPRRLVQVLSALINFLYYRDEKLALLQPIIHEFPNLDERCMELNAKIAEHQKAIADQELAAQMEVPMVQQLEAEVNSLKQKLVEYNKKQLALRANATAINDKKEETHRKIAKSDFELVKLAQENSKLLSKIVQSPEKLQRALEEKKTARAELKNAEKIAMQSVQEKTATLEIYSKGYEKLSKHSSKIQALQEQFTATKALEKEVKARKAKISDESVEIMALDTKTIEWDGKVHEMEERVKAKEKERDQIVADENQKLAALRSEVEWKLKCLEPRERKVEETIAKATKLCAEVDSTRTDAAEELRLIYAKFQQIGHAFTCYKDNFKTFLEQVDEVSKETLESLGRQAVEPLDTSATLSIEKENSCGPAP

SEQ ID NO: 157 - DNA, 1750 bp, Oryza sativa
ccttcgaaattcctctcatttgggggaaaggcgtcggcggcgagagagcggcggcggcgaagaagaagatggcgtccaacttctccttccctccgttgacgccggagcagatcgcggaggcgctgcacacctacggcctcgcccccaccgccaacctccgcgcggaggacatcgccaacccgcagccggatctcctccccgccgtcatctccaacttcctcgccaccgtcgtcgaccccaccggcgccgacgacctcgacgggcagctaggattcgacgcgctggcgtcgctcgacaacccggagcactacatggagggcatccgggtactccgcctccacaagagggccagcgctttcctcgagtccatccagttccccgggttcacgctccgcgacctcctccgccccgacccgcgccgcctcgtgcaagtcctcagcgccctcatcaacttcctctactacagggacgacaagctcgccctcctgcagcccatcatccacgagttccccaacttggatgaacggtgcatggagctcaaggccaagcttgccgagcatcagaaggcaattgccgatcatgagctcgcggcgcaaatggaggagccgatggttcagcagatagaggcggaggtcaattccctgaagcaaaagcttgtagagtacaacaaaaagcagctggcactgagagccaacgcgactgcgatcaatgacaagaaagaggagacccacagaaagattgccaaaaatgattttgagttggtgaaactagcacaagaaaattccaagttattgccaaaaattgttgagtccccagaaaagcttcagagggcccttgaagagaagaaaacagctcgtgctgaattaaagaatgctgagaagatagcaacgcaaagtgtacaagagaaaactgccactttggagatatacagtaagggttatgaaaaattgtcgaagcattctactaaaatccaggctttacaagaacaggttactgcaactaaagcccttgagaaagaagtcaaagcgcgcaaaactaagattagtgatgaaagtgttgaaattatggcccttgacacaaagattattgaatgggatgggaaagtgcatgaaatggaggagcatgttaaagctaaagaaaaaaaaaaggatcaaatagtagcagacgaaaatcagaagctggctgctttgagttctgaagttgaatggaaactcaagtgtcttgaacctcgtgaaaggaaagtagaggaaacaattgcaaaggctactaaactatgtgcggaagttgattcaacaaggactgatgctgcagaagaactacagctgatatatgctaaatttcaacaaattggacatgcgtttacttgctacaaggataattttaagtctttcttggaacaagttgatgaggtgagcaaagaaactttagaaagtttagatcgtcaagctgtggagccattggacacatctgcaacattgtagattgagaaagagaactcctgcagccccgctccctgaaaagaggatagccacttggagaagatagcctagtgtgttttatgccacagctgtaaatttggaattgagatgtttttgttatcactggtgacagttatggaccttatggtctgtttgaacctcgtctgaccaattcggtgactgagaatacttcatcgaattatctgcagtagttatgtaaaaatgccttgaatcactctgatatggaaatgttggtgtcaggttgccaagta

SEQ ID NO: 158 - protein, 470 aa, Oryza sativa
MASNFSFPPLTPEQIAEALHTYGLAPTANLRAEDIANPQPDLLPAVISNFLATVVDPTGADDLDGQLGFDALASLDNPEHYMEGIRVLRLHKRASAFLESIQFPGFTLRDLLRPDPRRLVQVLSALINFLYYRDDKLALLQPIIHEFPNLDERCMELKAKLAEHQKAIADHELAAQMEEPMVQQIEAEVNSLKQKLVEYNKKQLALRANATAINDKKEETHRKIAKNDFELVKLAQENSKLLPKIVESPEKLQRALEEKKTARAELKNAEKIATQSVQEKTATLEIYSKGYEKLSKHSTKIQALQEQVTATKALEKEVKARKTKISDESVEIMALDTKIIEWDGKVHEMEEHVKAKEKKKDQIVADENQKLAALSSEVEWKLKCLEPRERKVEETIAKATKLCAEVDSTRTDAAEELQLIYAKFQQIGHAFTCYKDNFKSFLEQVDEVSKETLESLDRQAVEPLDTSATL

SEQ ID NO: 159 - DNA, 1137 bp, Setaria italica
atgccgcctgcgccgaccgatgggataggcctcgttgtccggatgctccggccatccatggcgtcccatgagactatggcgggagagagagagcgagcgaaatccgaacgccgccgcccgacccgtccgtccatccggtggtccgattcgccggcgccagccagccgcccgcggcggggcccgatggcgaccaacttctccttcccggagatgacgccggcgcagatcgcggagggtctgcactcctacgacatcgcgcccaaccccaacctccgcgccgaggacatcgccaaaccgcagccggagctcctccccaacgtcttctccctcttcttcaccaacgtcgtcggcgacaacccccccgacgagcagctaggattcgatgagctgctggtgctcgaaaacccggagcaccacttgcaagccatggcgctcaggcgcatctaccggaaggcccgggacttcctcgactccatctacttcgggggcctcacgctccgcgacttcctccgcccccacccacgccgcatcatcgacatcctcagcgccttagtcaactacctgcacttcaggcaggagaagctcgacgtcctcaaacccatctcgcaagagtacttcgagcgtgaggaccagctcacggagctcagggctagggtcgccgagcttcagaaggcgaaaacggagcatgcctacaacgagcagatggaggagcccgtggtccagcagctccaggcggaggtcaacaccctcaggcagaagattcaagagtacaacacgcatcagttggcgctgagaatacatgaaactgaggtccgtctcaaggcaaaggagaaagaaagggaccaaagaatcgaagagaataaacagaagatgactaccttgaaatctgaagttgaatcagaacttaagtgccttgcagacagagaaagggaaatagaggagaagattgcaaaggctgcggatttatgctcccaatccgattcggtagaggttgctggcagaaaaaaacgagaggaaatctatgccacgtttgagcaagtttgtgagacggctaacatgtacatggatggcatcgatcgttcccgcaaagaagttgacgaagcgagtatggccattataagccagattggcccatga

SEQ ID NO: 160 - protein, 378 aa, Setaria italica
MPPAPTDGIGLVVRMLRPSMASHETMAGERERAKSERRRPTRPSIRWSDSPAPASRPRRGPMATNFSFPEMTPAQIAEGLHSYDIAPNPNLRAEDIAKPQPELLPNVFSLFFTNVVGDNPPDEQLGFDELLVLENPEHHLQAMALRRIYRKARDFLDSIYFGGLTLRDFLRPHPRRIIDILSALVNYLHFRQEKLDVLKPISQEYFEREDQLTELRARVAELQKAKTEHAYNEQMEEPVVQQLQAEVNTLRQKIQEYNTHQLALRIHETEVRLKAKEKERDQRIEENKQKMTTLKSEVESELKCLADREREIEEKIAKAADLCSQSDSVEVAGRKKREEIYATFEQVCETANMYMDGIDRSRKEVDEASMAIISQIGP

SEQ ID NO: 161 - DNA, 1371 bp, Sorghum bicolor
atggcgagctcattctccttcccgctgtttacgccggcggatatcgtggcggcgctgcacagctacggcatcgcgcccagccctagcttctgcgccgaggacgtcgtccaccctcagcccggcctcctcgccgaggtcctccagctcttcctcctcaacttcgtcggcgacgagcccgacgagcagctacagttcaatgccctgcaggtgctcgacaacccggagcaccacatgcgcgccctacggttttcgcggatctacaagagggccaacgctttcctccagtccatccagttccgggacctcaatatccgcgacctcctccgcgccgacggcccccgtgtcgtccacatcctcagcgccctcatcaactttctcttcttcaggcaagagaagctcaccttgctagagcctatcgtcgaagagtacggcgcgattgagaaacggcagggggagctcagggctaagatcgccgagcttagcaaggcgaaagaggaccatctgcttaaggagcaggtggaggcacacatggtccagcagctcgagaatgaggtcaatgccctcaagcagaggcttcatgattataacagagagcagctgtcactgcgcaatgcatcaaaagccttggacgaaaagagagaggatacactgaggaagatcaaccaggctgattttgagttggtgaaagttatgcaagaaaagaaaaagctatcagccaaaattgttcattcccctgaaaagctccagaggaaccttgaggagaagaaatcagtccgtgatgagttaaagaacttagagaagatagcaatgcagaaagtccaagagaaaaccaatactcttgagatgtatactaaggtttctgagaaactagcgaagcatctctctaaaatatctgctgtacatgaaaagagcgctgctgctaaagcttttgagaaggatgttaaagcacacaaagagaagatcagtgatcaaaatctggagataaaggcacttcgcaataaagctgctgaatgggaaatgaaagtactcgagaacgaggccaaagtgaaagcaaaggagaaagaaagggatcaaagagttggagagcacaatcggaagatgactgcattgaaatctgaagttgaatcggagcagaagtgccttgaggagaaagaaagaaaaataaaggaaacaattgacaagggttctgaattatgctctcaagctgattcggttgctgaagctggaaggaagaaaatagaggaaatctatgggaagtatgatcaagtttgtgaggcggctaacatgtacattgatggttcggatcagtccttcgaagagactgatgaagctgcagcgatgctgaaaactatagcccagagtggcgcttga

SEQ ID NO: 162 - protein, 456 aa, Sorghum bicolor
MASSFSFPLFTPADIVAALHSYGIAPSPSFCAEDVVHPQPGLLAEVLQLFLLNFVGDEPDEQLQFNALQVLDNPEHHMRALRFSRIYKRANAFLQSIQFRDLNIRDLLRADGPRVVHILSALINFLFFRQEKLTLLEPIVEEYGAIEKRQGELRAKIAELSKAKEDHLLKEQVEAHMVQQLENEVNALKQRLHDYNREQLSLRNASKALDEKREDTLRKINQADFELVKVMQEKKKLSAKIVHSPEKLQRNLEEKKSVRDELKNLEKIAMQKVQEKTNTLEMYTKVSEKLAKHLSKISAVHEKSAAAKAFEKDVKAHKEKISDQNLEIKALRNKAAEWEMKVLENEAKVKAKEKERDQRVGEHNRKMTALKSEVESEQKCLEEKERKIKETIDKGSELCSQADSVAEAGRKKIEEIYGKYDQVCEAANMYIDGSDQSFEETDEAAAMLKTIAQSGA

SEQ ID NO: 163 - DNA, 843 bp, Sorghum bicolor
atggtccagcagctcgagaatgaggtcaatgccctcaagcagaggcttcatgattataacagagagcagctgtcactgcgcaatgcatcaaaagccttggacgaaaagagagaggatacactgaggaagatcaaccaggctgattttgagttggtgaaagttatgcaagaaaagaaaaagctatcagccaaaattgttcattcccctgaaaagctccagaggaaccttgaggagaagaaatcagtccgtgatgagttaaagaacttagagaagatagcaatgcagaaagtccaagagaaaaccaatactcttgagatgtatactaaggtttctgagaaactagcgaagcatctctctaaaatatctgctgtacatgaaaagagcgctgctgctaaagcttttgagaaggatgttaaagcacacaaagagaagatcagtgatcaaaatctggagataaaggcacttcgcaataaagctgctgaatgggaaatgaaagtactcgagaacgaggccaaagtgaaagcaaaggagaaagaaagggatcaaagagttggagagcacaatcggaagatgactgcattgaaatctgaagttgaatcggagcagaagtgccttgaggagaaagaaagaaaaataaaggaaacaattgacaagggttctgaattatgctctcaagctgattcggttgctgaagctggaaggaagaaaatagaggaaatctatgggaagtatgatcaagtttgtgaggcggctaacatgtacattgatggttcggatcagtccttcgaagagactgatgaagctgcagcgatgctgaaaactatagcccagagtggcgcttga

SEQ ID NO: 164 - protein, 280 aa, Sorghum bicolor
MVQQLENEVNALKQRLHDYNREQLSLRNASKALDEKREDTLRKINQADFELVKVMQEKKKLSAKIVHSPEKLQRNLEEKKSVRDELKNLEKIAMQKVQEKTNTLEMYTKVSEKLAKHLSKISAVHEKSAAAKAFEKDVKAHKEKISDQNLEIKALRNKAAEWEMKVLENEAKVKAKEKERDQRVGEHNRKMTALKSEVESEQKCLEEKERKIKETIDKGSELCSQADSVAEAGRKKIEEIYGKYDQVCEAANMYIDGSDQSFEETDEAAAMLKTIAQSGA

SEQ ID NO: 165 - DNA, 921 bp, Sorghum bicolor
atgtcgagctccttttccttcccgaagtataagccgacggagatcgtggacgcgctgcagatctacggcatcgcgccgaccgccaccttccaagccgatgatgtcgcaaaccctcggcccggcctcgtcgccgaagtcctcgaactctttatcgccaacttcctctgcgaagagcccgacgagcagctacagctccaggcgctgcaggtgctcgacatcccggagcaccaaatgcaccctctacagttctcgcggatctacaagagggccaacgccttcctccagtccatccagttccgggacctcaatctccgcgacctcctccgcgccgatggcccccgtgtcgtccacatcctcagcgccctcatcaatttcctccacttcaggcacgacaggatcagcgtcctcgccctcatcgtccaagagtacgaagcgcttgaggaacggcagaaggagctcagggctaagatcgccgagcttcagaagacgaacgaggagcatctgcttaaggagcagatggaggcgcccgtggtccagcagctcgagaaggaggtcaatgacctcaagcataggcttcatgattacaacagagagcagctgtcgatgcgcaatgcatccaaagccttggacgaaaagagagaggagatactcaggaagatcaagcaggctgattttgagttggtgaaagttatgcaagaaaaacaaaatctatctgccaaaattgttcattcccctgaaaagctccagaggaaccttgaggagaagaaaacagtccgtgatgagttgaagaacttagagaagatgacaatgcagaaagtccaagagaaaaccaatactcttgagatgtatactaaggtttctgagaaactaacaaacaatgattgtacaaatatattattcatgctagagtgctgctgctaa

SEQ ID NO: 166 - protein, 306 aa, Sorghum bicolor
MSSSFSFPKYKPTEIVDALQIYGIAPTATFQADDVANPRPGLVAEVLELFIANFLCEEPDEQLQLQALQVLDIPEHQMHPLQFSRIYKRANAFLQSIQFRDLNLRDLLRADGPRVVHILSALINFLHFRHDRISVLALIVQEYEALEERQKELRAKIAELQKTNEEHLLKEQMEAPVVQQLEKEVNDLKHRLHDYNREQLSMRNASKALDEKREEILRKIKQADFELVKVMQEKQNLSAKIVHSPEKLQRNLEEKKTVRDELKNLEKMTMQKVQEKTNTLEMYTKVSEKLTNNDCTNILFMLECCC

SEQ ID NO: 167 - DNA, 1362 bp, Vitis vinifera
atgtcgaaattcgaatacccaatgattccacgctcagaaattatagcaatccttaacgagtccaaaattgcaacggtctacgatgaggatctcatcaatcccaaccccgatttcgtctccgatctctacaccaggctcctcattcacctcgactctctccaggaagatcctgggcaagtcgaatttgccgccttggagcggctcgagaacccagattggcaccgtgattctgttcgtatcatgaatttgtacagcaagattaaggagcttgtggcttcgctggattgcccttggaagtttaccctcaaagatctcatacgccccgatagggacaggaccgagaagtttctcggcactatactgaatttctttcttcacaaagattcaaaaatgaatgaactaagaccaattgtagaggaatcaaatcttctagatgaagagcgaaagctgttggaagatagaatttcccagttggatgcagagattacagactacaatgaagcgagagaaagagcgatgcctcttgttcaagagatagaggtaaaggttaaagatttgcgtcaggccattccaagcctcaacaatcagcagatgtcattgagaacatctttccgaaaaatgaaggagaaggttgcagaaatggatgagaagatttctagtgcggagtttgcccttgtacaaagtgtccaagaaaatgccaatctacgttcgaaaattgtacaatcaccagataaactacagaggactttagaggagaaaaaatctgttcgagttgaggcaaagaatgcagaaagatcagcaatgcaatcttttcaggagaagtctgccattgttgaggtctacacaaaggctggcaagaaaatgtccaagcattttgcgcaaatgcaggctatacaagaacaggtgaactctgccaaagccatagaaaaagatctcaaggttctaaaaactaagctgagtgaagagggagtcttggataagtcttttgaggccaaacttcttgaacgacaaagaaaagtggaacagttagatgaactaagaaagcagttagaaaaagaacgaaattttaagtgtgaggaggctgctaaagaattaaataatgtcaagttggcagtggaatcaaaaaggcgtgagttagaagcaaggcagaggaaggttgaagctgaggcagcagaggttgatgctacaactttaaagattaattcagtaaaagaatctggagcagctaaacagcaaaagttgacccgcaagggtgaagagattgtgaaagagttccaccaatatgcaaactctattggggtcttgctgccaaggatccaagtggagccagaagttgatcaagatatgggcagatccaactaa

SEQ ID NO: 168 - protein, 453 aa, Vitis vinifera
MSKFEYPMIPRSEIIAILNESKIATVYDEDLINPNPDFVSDLYTRLLIHLDSLQEDPGQVEFAALERLENPDWHRDSVRIMNLYSKIKELVASLDCPWKFTLKDLIRPDRDRTEKFLGTILNFFLHKDSKMNELRPIVEESNLLDEERKLLEDRISQLDAEITDYNEARERAMPLVQEIEVKVKDLRQAIPSLNNQQMSLRTSFRKMKEKVAEMDEKISSAEFALVQSVQENANLRSKIVQSPDKLQRTLEEKKSVRVEAKNAERSAMQSFQEKSAIVEVYTKAGKKMSKHFAQMQAIQEQVNSAKAIEKDLKVLKTKLSEEGVLDKSFEAKLLERQRKVEQLDELRKQLEKERNFKCEEAAKELNNVKLAVESKRRELEARQRKVEAEAAEVDATTLKINSVKESGAAKQQKLTRKGEEIVKEFHQYANSIGVLLPRIQVEPEVDQDMGRSN

SEQ ID NO: 169 - DNA, 1287 bp, Vitis vinifera
atgtcgaaattcgaatacccaatgctcccacgctcagatatcatagcaatccttaacgaatccaaaatcgcaacagtctatgaggacaatctcatcaatcccaaccccgatttcgtctccgacctctacaccaggcttctcattcacctcgattctctccaggaagatcctgggcaaatcgaatttgccgcattggagcagcttgagaacccagattggcaccgtgattctgttcgtgtcatgaatttgtacagcaagattaaggagcttgtggcttctctggagtgccctaagaagtttaccctcaaagatcttatacgccccgatagggacaggaccgagcggtttctcggcaccatactgaatttctttcttcacaaagattcaaaaatgaatgacctaagaccaattgtagaggaattgactcttctagatgagcagcgtaaccagttcaaagatagaatttcccagttggatgcagagattgcagactgcagtgaagcaagagaaagagagaggccgcttgttgaagaggtagaggtaaaagttaaagaactgcgtcagaccattccaagcctcaacaatcagcagatgtcattgagggcatcttttcgaaaaatgaaggagaaggtcacagaaatggatgagaagatttctagcgctgagtttgcccttgtacaaagtgtccaagaaaatgccaatctacgttctaaaatcatccaatcaccagataaactacagagggctttagaggagaagaaatcagatcgaattgaggtgaagaatgctgaaaaatcagcaatgcaatcttttcaggagaagtctgctattcttgaggtttacacaaaggctggcaagaaaatgtccaagcattttgcccaaatgcagactatacaagaacaggtgaattctgccaaagccattgaaaaagatctcaaggttataaaaactaagctgagtgaagagggagtcttggaaaagtctcttgaggccaaacttgttgaatggcaaggaaaagtggaacagttggatgacctaagaaagcaattagaaaaagaacgagattttaagtgtgaggaggctgctaaagaattgaataatgtcaagttggcagtggaatcgagtaggcatgagttggaagcaaggcaaaagaaggttgaagcccaagcagcggaggttgatggtataactttaaagattaattcagtaaaagaatctggagcagctaaacagcaagagttgatcagcaagggtgaagagattatgaaagaggtacacttccattga

SEQ ID NO: 170 - protein, 428 aa, Vitis vinifera
MSKFEYPMLPRSDIIAILNESKIATVYEDNLINPNPDFVSDLYTRLLIHLDSLQEDPGQIEFAALEQLENPDWHRDSVRVMNLYSKIKELVASLECPKKFTLKDLIRPDRDRTERFLGTILNFFLHKDSKMNDLRPIVEELTLLDEQRNQFKDRISQLDAEIADCSEARERERPLVEEVEVKVKELRQTIPSLNNQQMSLRASFRKMKEKVTEMDEKISSAEFALVQSVQENANLRSKIIQSPDKLQRALEEKKSDRIEVKNAEKSAMQSFQEKSAILEVYTKAGKKMSKHFAQMQTIQEQVNSAKAIEKDLKVIKTKLSEEGVLEKSLEAKLVEWQGKVEQLDDLRKQLEKERDFKCEEAAKELNNVKLAVESSRHELEARQKKVEAQAAEVDGITLKINSVKESGAAKQQELISKGEEIMKEVHFH

SEQ ID NO: 171 - DNA, 1956 bp, Zea mays
ggcggtaggctgcgggctgtgcaatcgaaagttctgatagataaaaatgacacataccgaacgataaaccctaatgcaacatcttatcttatgtcttcgtttgaccggctcgccttattcatgggctccgcaagatttcagtggtgagctggtttcctagcagtggccagacactatgcctgggccgtcttgcgaaacgaaaccaacacttggttctgggcccaaagcctaaggccctaatccagttcttgttccttccaatttttccagcgccgggcgggcgggaagacgaaaacccaacgtcgccgcctgcgaaaggggaaaacccatccgatttcgattcgatttgccggcggtgcccgcggcggagaggatggcgagctccttctccttcccgctgatgaatccggcggacattgcggaggcgctgcacagctactgcatcgcgcccagccccggcctccgcgccgagcacatcgtcaccccgcagcccggcctcgtcgccgaggtcctcgccctcttcctcgccaacttcgtcggcgacgacgagcccgacgagcagctagagtttcaggcgctgcaggcgatcgacaacccggagcaccacatgcgcgccatagcgctctcgcgcctctaccggagggccaacgccttcctccactccatcctcttccgggacctcacgctccgcgaccttctccgcgccgacggccgccgtgtcgtctacatcctcagcgccataatcaacttcctccactacaggcaagataagctcagctttcttgagcccatcgtccaagagtacagcccccttcaggaacggcacacggagctcagggctaagatcgccgagcttcggaacgcaaaagaagaccatctacttaaggagcagatggaggcgcccgtggtccagcaactcgagaaggaggtcaatgccctcaaacagaggcttcgtgaatacaacaaagagcagctgtcgctgcgcgttgcaacaaaagccatagacgaaaagaaacaggagttactcggcaagatgaaccaagctgatttcgagttggtgaaagttatgcaagaaaaggaaaggctatcagccaaaattgttcattcccctgaaaagctcctgaggacccttgaggagaagaaagcagtccgtgatgagctaaggaactcagagaaggtggcaatgcaaaaagttcaagagaaaaccaatactcttgagacgtatactaaggtttctgagaaattagtgaagcatctctctaaaatttctgctgtacatgaaaaaggcactgttgctaaagcttctgagaaggatgttaaagcacacaaagagaagattggtgatcaaaatttggagataaaggcacttcgcaataaagctgctgagtggcaattgaaagtactcgagaacgagggcattctgaacgcaaaggagaaagaaagggatcaaagagttgcagagaacaatctgaagatgaacgcgttgaaatctgaagtcgaatcggagcacaagtgccttgaggagaaagaaataaaaataaaggaaaagcttgaaaaggttgctgaattatgctctcaagctgattcggttgctgaagctggaaataagaaaatacaggaaatctgtgggaagtataatcaagtttgcgaggctgcaaacatgtacatggatggcatcgatcgttcctttgaagagatcgatgaagctgcagtgagtttgaaagctataggccagagtggtgcttgatgcgtgaagtgaccatcgacgggcaatggatcgtggacagcatagtaaattgtgctagtgttaagctctgtatatatacctccaccgcgtctgtatatgccttcttcccactattttaatttaattagcactaattgccagtgaaaatggatatgtctaccgatcttgattaattctatttcaattcaaagcaacctacgccctgtcca

SEQ ID NO: 172 - protein, 457 aa, Zea mays
MASSFSFPLMNPADIAEALHSYCIAPSPGLRAEHIVTPQPGLVAEVLALFLANFVGDDEPDEQLEFQALQAIDNPEHHMRAIALSRLYRRANAFLHSILFRDLTLRDLLRADGRRVVYILSAIINFLHYRQDKLSFLEPIVQEYSPLQERHTELRAKIAELRNAKEDHLLKEQMEAPVVQQLEKEVNALKQRLREYNKEQLSLRVATKAIDEKKQELLGKMNQADFELVKVMQEKERLSAKIVHSPEKLLRTLEEKKAVRDELRNSEKVAMQKVQEKTNTLETYTKVSEKLVKHLSKISAVHEKGTVAKASEKDVKAHKEKIGDQNLEIKALRNKAAEWQLKVLENEGILNAKEKERDQRVAENNLKMNALKSEVESEHKCLEEKEIKIKEKLEKVAELCSQADSVAEAGNKKIQEICGKYNQVCEAANMYMDGIDRSFEEIDEAAVSLKAIGQSGA

SEQ ID NO: 173 - DNA, 1975 bp, Zea mays
ggcggtaggctgcgggctgtgcaatcgaaagttctgatagataaaaatgacacataccgaacgataaaccctaatgcaacatcttatcttatgtcttcgtttgaccggctcgccttattcatgggctccgcaagatttcagtggtgagctggtttcctagcagtggccagacactatgcctgggccgtcttgcgaaacgaaaccaacacttggttctgggcccaaagcctaaggccctaatccagttcttgttccttccaatttttccagcgccgggcgggcgggaagacgaaaacccaacgtcgccgcctgcgaaaggggaaaacccatccgatttcgattcgatttgccggcggtgcccgcggcggagaggatggcgagctccttctccttcccgctgatgaatccggcggacattgcggaggcgctgcacagctactgcatcgcgcccagccccggcctccgcgccgagcacatcgtcaccccgcagcccggcctcgtcgccgaggtcctcgccctcttcctcgccaacttcgtcggcgacgacgagcccgacgagcagctagagtttcaggcgctgcaggcgatcgacaacccggagcaccacatgcgcgccatagcgctctcgcgcctctaccggagggccaacgccttcctccactccatcctcttccgggacctcacgctccgcgaccttctccgcgccgacggccgccgtgtcgtctacatcctcagcgccataatcaacttcctccactacaggcaagataagctcagctttcttgagcccatcgtccaagagtacagcccccttcaggaacggcacacggagctcagggctaagatcgccgagcttcggaacgcaaaagaagaccatctacttaaggagcagatggaggcgcccgtggtccagcaactcgagaaggaggtcaatgccctcaaacagaggcttcgtgaatacaacaaagagcagctgtcgctgcgcgttgcaacaaaagccatagacgaaaagaaacaggagttactcggcaagatgaaccaagctgatttcgagttggtgaaagttatgcaagaaaaggaaaggctatcagccaaaattgttcattcccctgaaaagctcctgaggacccttgaggagaagaaagcagtccgtgatgagctaaggaactcagagaaggtggcaatgcaaaaagttcaagagaaaaccaatactcttgagacgtatactaaggtttctgagaaattagtgaagcatctctctaaaatttctgctgtacatgaaaaaggcactgttgctaaagcttctgagaaggatgttaaagcacacaaagagaagattggtgatcaaaatttggagataaaggcacttcgcaataaagctgctgagtggcaattgaaagtactcgagaacgagggcattctgaacgcaaaggagaaagaaagggatcaaagagttgcagagaacaatctgaagatgaacgcgttgaaatctgaagtcgaatcggagcacaagtgccttgaggagaaagaaataaaaataaaggaaaagcttgaaaaggttgctgaattatgctctcaagctgattcggttgctgaagctggaaataagaaaatacaggaaatctgtgggaagtataatcaagtttgcgaggctgcaaacatgtacatggatggcatcgatcgttcctttgaagagatcgatgaagctgcagtgagtttgaaagctataggccagagtggtgcttgatgcgtgaagtgaccatcgacgggcaatggatcgtggacagcatagtaaattgtgctagtgttaagctctgtatatatacctccaccgcgtctgtatatgccttcttcccactattttaatttaattagcactaattgccagtgaaaatggatatgtctaccgatcttgattaattctatttcaattcaaagcaacctacgccctgtccaggcccacggaattttctac

SEQ ID NO: 174 - protein, 457 aa, Zea mays; identical to SEQ ID NO: 172

SEQ ID NO: 175 - DNA, 637 bp, Brassica napus
catgattcagaatctgaatgggacgaatatcagcagcgagattgtaattttgtttcgagagctcatgcaagctcagctattgaactccgaccaagtgaccaagttgaatcttgtattcctggcgagtagaaaacaaatgctgaggaatggaactctagaggagacagttgaagaacaaatgcaacggacagtttcatcaattcatgatcatggtgaagtctgtagctatcttgttgatttgatggtatctaattcttgtggacacacaagtggtggaagcgaaacaacatgtaggcagaagaagaaacatgtactcgttgaaatggaacgattctccgaactactatcaacaagaagagataaagttactgattcaaggccgtgtaaggtctatgcaagacagagaaagaggataaatgcaatatgggacaaatcgtgaagaacagcagatctctagtgtttgtacaggttgaattgtgcatacttaaaggtccagctttctaattttgttaaccaaatttccactatatactggtaagttcttggtgtggtttccacgtttatgaatatatagacagttatatgacatcagaaggactgtaaacattcgaaccttacaaagagaaactaagaaccc

SEQ ID NO: 176 - DNA, 3618 bp, Brassica rapa
atggatacgatctctcttctctgttccgctgaggaatgttccgtcagcgaggagtttgtggagagagtctctgctcagctctcttctggtgccttgggttggagccgacgacagcttcacatgatgtggatgacccctttgttctttatatcttgtgtgtatgaggcatgttgtgatttatcttttctttgtcatgctagcgaggagatccgcggtgaaatctttttcgttctgtacaaattttctgctctacagttcacagaacaggatgttgatggagctgagattctttcttcattgtctcctaagctcctatccctatccttggaggctcttgctaagacacagagagatgaggttcgcttgaattgtatagcccttttgaccacattgacccagcaaggtctcttagcaaattcacgtacaagtcctgtcagcagcatgagcttggatgaagtggatgatgaccccatgctgacggctgagactgtaactgtcaggccttgtttagatatcttgtttgctgaagccatcaaaggtccgttgctttccactgacagcgaggtgcaaataaaagcccttgatcttatcttccattatgtgtcccaagagagtgttccaagcaaacagattgaagttttggtagaagaaaatgttgctgattatatatttgagatactgcggttatcagagtgtaaagatcatgtcatcaacccatgcctcagagttcttgatttgttttccctagccgagctttcctttcggaagaaacttgttattgggtttccttcagtcatccaagtgcttcactatgtaggcgaagttccttgtcatccttttcaagtccagacactaaagcttgtttctagctgtatttctgatttccctgagatcgcttcaagctctcaagttcaggaaatttctctggttctgaaaatgatgcttgaaagatattattctcaagagatgggattatttccggatgcctttgcaattatctgctcagtctttgtttccctaatgaaaaccccatcttttgctgagactccagatgtgtttaaatcattgcaagactccctaagacatgccgttttggtatgtcttagtctccctgagaaagattcaactcagatctcgcatgcagtctacttgctcaataaagtatatgcatactgtacttcaccaacatccataaacaatactggttgcattgaattaagacaatgtgttatagatgtgtgtgtatcacatctactaccgtggtttctttctgatgtcaatgaggtcaatgaggaagcaattcttggcataatggaaagctttcacttcattcttcttcagaattcagatgttcaggccatggagtttgcggagatacttgtttcagcagattggttcagctttgcatttggatgtctaggaaacttctctagtgataagatgaaacagagggtatatcagatgctcagttcccttgttgatgttcttcacagacagaaattggggtcgcatatcagagatgctcttttctgtcttccttctgatccacaagatttgctgtttttgctcgggcaagatagttccaacaatcaagagttggcttcttgccagtttgcagctttggttattttccataccggttggatacacaatgacaggcttgcagatgataagcttgttttcgcttctttggagcaatacattcttgtcaacaggacaagtttaatctcggattctccagctgtgctgcaactagtgaatctatatagtctttgcaggagtcttcaaaacaagcgataccagatatcttacagtctagaagccgagaggatagtcttccatctactaaacgaatatgattgggacttgggttcctgtgatattcatctagaatcgctcaagtggctttttcaacaagaaagtatcagcaaaggtttaacttaccagatccaaaagatttccaggaacaacttaattggaaaagaagttcacaatgtatatggagatggcagacagagatcactcacgtattggttcgcaaagatgatatcagaaggagacaactatgccgcaactcttttggttaacttgctgacccaccttgcagagaatggagacaaagagagtgatgttatctcaattttaaatataatgacgacggtcgtttctaaatttccaactgcctccaaccatttatccatgaatggcattgggaatgcaattcatagactcgtttgtagttttagaaactcatccatgggaacatctttccctacactacttgtgctaatattcaacattctagcttctgtgcaacctggagtgctcaaaaatgatgaatcctggaatgctgtgtttattaagttgttacactatttaagcttgcgagacactgccataacacagccagaccatgaaggtatgatggtgattggcattctttgcttggttctgtaccactcatcacatggagcacttttggattcttcaagaattatcatggtgaattcgtacttggtatcggcaatcaacaatgttgttgatgtagcttgctcaaggggtccagcattgactcagtctcaggatgaaactgaaatctgggaggctctagcattcacattacctctctgcttttcctcgttaagaagcctgcagattgttctcgctggagctgtggattggcaaactttctgtggcccatcgagcaacctggaaacactacccgtagtctgcatccattgccataatttgtgcaggttgatgcattttggaacaccgcaaatcaagctcatggcctcttattgtctcttagagctgttcactggactgtcacaacagattgacattagaaaagagcaactacgttgttcatcgagttaccttaaagcaatgaaggctgttttatgtggtctggtattctatgatgacataagagtagccacaaactctgcgctttgtctgtccatgataataggatgggaagacatggaaggaagaacagagatgcttaagacctgctcatggtacaggtttattacagaagaaatgtcagtgtcattggccatgccgtgttctgcatcaaatacctttgtgaaccaccacaagcctgcagtctatgtaactgtcgccatgctaaggctgaagaacaaaccggtgtggctgagaagtgtttttgatgagtcttgcatctctagcatgattcagaatctgaatgtgacgaatatcagcagcgagattgtgattttgtttcgagagctcattcaagctcaactattgaactccgaccaagtaaccaagttgaatctcgtattcctggcaagcagaaaacagatgcaaaggaatggcactctagacgagacagttgaagaacaaatgcaacggacagtttcatcaatccatgatcatggtgaagtctgcagctatcttgttgacatgatgctatctagttcttttggacacacaagtggaagcgaagcaacatgcattcagaagaagaaacaggttctcgctgaaatggaacaattctccgaactattatcaacaagaagagattatgttactgattcaaggccgtgtaaggtctatacaagacagagaaagaggatacatgcaaaatga

SEQ ID NO: 177 - protein, 1205 aa, Brassica rapa
MDTISLLCSAEECSVSEEFVERVSAQLSSGALGWSRRQLHMMWMTPLFFISCVYEACCDLSFLCHASEEIRGEIFFVLYKFSALQFTEQDVDGAEILSSLSPKLLSLSLEALAKTQRDEVRLNCIALLTTLTQQGLLANSRTSPVSSMSLDEVDDDPMLTAETVTVRPCLDILFAEAIKGPLLSTDSEVQIKALDLIFHYVSQESVPSKQIEVLVEENVADYIFEILRLSECKDHVINPCLRVLDLFSLAELSFRKKLVIGFPSVIQVLHYVGEVPCHPFQVQTLKLVSSCISDFPEIASSSQVQEISLVLKMMLERYYSQEMGLFPDAFAIICSVFVSLMKTPSFAETPDVFKSLQDSLRHAVLVCLSLPEKDSTQISHAVYLLNKVYAYCTSPTSINNTGCIELRQCVIDVCVSHLLPWFLSDVNEVNEEAILGIMESFHFILLQNSDVQAMEFAEILVSADWFSFAFGCLGNFSSDKMKQRVYQMLSSLVDVLHRQKLGSHIRDALFCLPSDPQDLLFLLGQDSSNNQELASCQFAALVIFHTGWIHNDRLADDKLVFASLEQYILVNRTSLISDSPAVLQLVNLYSLCRSLQNKRYQISYSLEAERIVFHLLNEYDWDLGSCDIHLESLKWLFQQESISKGLTYQIQKISRNNLIGKEVHNVYGDGRQRSLTYWFAKMISEGDNYAATLLVNLLTHLAENGDKESDVISILNIMTTVVSKFPTASNHLSMNGIGNAIHRLVCSFRNSSMGTSFPTLLVLIFNILASVQPGVLKNDESWNAVFIKLLHYLSLRDTAITQPDHEGMMVIGILCLVLYHSSHGALLDSSRIIMVNSYLVSAINNVVDVACSRGPALTQSQDETEIWEALAFTLPLCFSSLRSLQIVLAGAVDWQTFCGPSSNLETLPVVCIHCHNLCRLMHFGTPQIKLMASYCLLELFTGLSQQIDIRKEQLRCSSSYLKAMKAVLCGLVFYDDIRVATNSALCLSMIIGWEDMEGRTEMLKTCSWYRFITEEMSVSLAMPCSASNTFVNHHKPAVYVTVAMLRLKNKPVWLRSVFDESCISSMIQNLNVTNISSEIVILFRELIQAQLLNSDQVTKLNLVFLASRKQMQRNGTLDETVEEQMQRTVSSIHDHGEVCSYLVDMMLSSSFGHTSGSEATCIQKKKQVLAEMEQFSELLSTRRDYVTDSRPCKVYTRQRKRIHAK

SEQ ID NO: 178 - DNA, 3657 bp, Glycine max
ggccatcgatcttcgttgaaccttcaaacgcacgatgaaggtggctccctctgcctcgtgtgcttctccaaccttgtctccaatcctctctccccaaccgtccatgtctcctacgctctctcccagctctctcgctccctctccatccctcacttccttcaatcccttctcactttccaccctcacttcctcctctcccctctcctcgccgccctctcctccttccacgaccaacctatcgccgctcagctcacgcatctcatcctctctctctcttcctccgctgatccttccctttgctcccaattcatcgctaggatttccgatcgcatcgcttccgctgctttgggttggacttcccctcagttgcacatgattcactgccttggggctcttctgaattgtgagaaggatgatgatctccatgcacacatcaaagacatgtatagtttcatttctgttcttgttacgggccttcaattgccgagtgaggagattcgcggggaggttctctttgtcctttacaaactatatgttcttcagagtacatcagcagggggagatggaagtgatatgttgattcccttctgtccacagatcttgtatctgttggtggatgttctcatgaagactcaaaatgatgatgttcgcttgaattgtattgcacttttgactatgctggctcgaagacatttgctcagggaagaatgtgcatacgatactagtaacatgtcttccaatggaggagttaactctaaagaaaccgaggacggaaccaagggcacatctctggtaaatctgtttgctgaagccatcaaaggcccattactttcgtcagacagtcaagtccaaatcggcactctagatttactctttcactatttgtcttcggtcagaaattcagactatcagattcgagttttggtggaagaaaatattgcagattatttatttgaaatattaagattatcagagtataaggacccagcagtcaagatgtgccttcagacactgaagctcatttatgaatgcatttctgagtgccctggatctgtatcaacttctcaactagaggagctgattcttgttttgataagaatgcttagaaagcattctgatggggagatgggtatgattcccgagacgtttataatggtctgctctatctttgttgctcttataagatctccatcttgtaatggagctttagatctctcaaaatcgattgaggaagcaacgaaccatgccattttagcttgtctctctgtctctgaaaggaacataaaccaaattttgcaatgtttgtacctacttaaagaggcatatgcatatagtcatgatggaaactccattaactctagtaagctggagcttagaagtggcattctagatatatgcagaacccatttactgccatggcttgtagtgggcatcaatgaaatggaagaggacattgccctgggattgctggaaacttttcattcgatattgcttctgcactctagtattaattccatggaatttgcagagactctgatttcaatcggttggttcagtttttcatttgaatgtctgggtttgtttacaggagataggatgaaaaatagaatatatttgttgctcagttcactcatggattctctcctgggaaatgattctggacaaccaattagagaggctgctttgcacctgcctcgcgatcctattgatttactctttttgcttgggcaaaggagtactaacagtttggatttgccttcttgtcaatctgctgttttgctgattatgtacaccagttcgctatatgatgaaagttcactaaggggtcttggcagtatgaactaccaaattcactatagtcgagatgcggaggagataatattccagctcataaacaatgatgaatgggacttactttcagcaagaattcacacggtgtcattgaagtggctgtttcaacaagagaacataatcaactcattaagccatcagattttgaaattctgcagaagctataacttagaagaggctgacataattatcggaaacaattatcaaactgtaaatgtacagacactttcggagttggtatcaactgaagataactatggagctagacttttcgtgtgcttattagcacagctcttggaggaagaaggccgggaatatgatataatatgtgttctgaatgtcatggcaactatggttctcgtctgtccagctgcttgtgaacaattatctttgcatggaatagcgacaacaatcaggacttggtgttatttgagcaatagcttgtcgacaacaacatacatgtccatcttgattttggtttttaacactttgagttcagtgcatcctgaaacactatcggttgatcaaagctgggtagcgataaccatgaaggtgtgggtagctgaacttctatttattcacattgcatcccgtataaattcaatcatgatcatgattagagactctgatttttatatgatggagtgttcaattccatccaaagaggttgatatcttgagtgacgaaagcctctttgttattggcattctttccttaattttgcatctttccaccaataaagcacttgaagagacttccaaggccattctttttaatacttgtataatctccatggtcaacactgtagtctgcgcggcttcttcgaagggacctgctttggttgaccatgacgagggaacaagtacaggagaaactttaatatttgttcttttgcttcattacttcgccgttaaaagcttgcatgctattctaccagggttcgtggattggcaaagcttctttgcttcaacgaatccatccgagccgctagccttcattggaatccgttgccatgacttgtgcagacttctgcattttggttcaactgtaatcaagattgctgcttcttatagcctgttagagttatttaaaagaatatcagatcaaataaacagtaatcatgaagagttgagatgtactattgggtacataatgtccataaggagtatattggaagggctagttttctataatgatctgagagtggctacaaattgttccctctgtctgtcaatgattctgggatgggaaaagctgacaaaggaaacaaaagtcttagaagagagtagctggtgtagattgattatagaggagatgacagtatctttggcagctcctgctttagcatcacaatcattcatgaacaaccaaaggcctgcagtgcttgtagctattgcgttgctgaaactgcataaaatccctcagtggatgagatctgtgtttgataattcaagcatatctggcatattggggaacctttctgctagtaacttgagctcggagattttggctttatttcgagaactactgaaatctaacttcttaagtacagagcaaattgcaactataaatcaaatgctccaggaatgcagaaagcgtatgtacagtaacaatgctcaagaggatctcccaaatgagccgataaagaaggtcctcaccacatcgtataatatgggagacatttgtgagtatctcattgatttaatgacatcagaggcgtacttagatacgggcagtaagaagctcttagaagaaattgagctgtttttcagtaccttgtctgtagataatggtagttgtatgtag

SEQ ID NO: 179 - protein, 1218 aa, Glycine max
GHRSSLNLQTHDEGGSLCLVCFSNLVSNPLSPTVHVSYALSQLSRSLSIPHFLQSLLTFHPHFLLSPLLAALSSFHDQPIAAQLTHLILSLSSSADPSLCSQFIARISDRIASAALGWTSPQLHMIHCLGALLNCEKDDDLHAHIKDMYSFISVLVTGLQLPSEEIRGEVLFVLYKLYVLQSTSAGGDGSDMLIPFCPQILYLLVDVLMKTQNDDVRLNCIALLTMLARRHLLREECAYDTSNMSSNGGVNSKETEDGTKGTSLVNLFAEAIKGPLLSSDSQVQIGTLDLLFHYLSSVRNSDYQIRVLVEENIADYLFEILRLSEYKDPAVKMCLQTLKLIYECISECPGSVSTSQLEELILVLIRMLRKHSDGEMGMIPETFIMVCSIFVALIRSPSCNGALDLSKSIEEATNHAILACLSVSERNINQILQCLYLLKEAYAYSHDGNSINSSKLELRSGILDICRTHLLPWLVVGINEMEEDIALGLLETFHSILLLHSSINSMEFAETLISIGWFSFSFECLGLFTGDRMKNRIYLLLSSLMDSLLGNDSGQPIREAALHLPRDPIDLLFLLGQRSTNSLDLPSCQSAVLLIMYTSSLYDESSLRGLGSMNYQIHYSRDAEEIIFQLINNDEWDLLSARIHTVSLKWLFQQENIINSLSHQILKFCRSYNLEEADIIIGNNYQTVNVQTLSELVSTEDNYGARLFVCLLAQLLEEEGREYDIICVLNVMATMVLVCPAACEQLSLHGIATTIRTWCYLSNSLSTTTYMSILILVFNTLSSVHPETLSVDQSWVAITMKVWVAELLFIHIASRINSIMIMIRDSDFYMMECSIPSKEVDILSDESLFVIGILSLILHLSTNKALEETSKAILFNTCIISMVNTVVCAASSKGPALVDHDEGTSTGETLIFVLLLHYFAVKSLHAILPGFVDWQSFFASTNPSEPLAFIGIRCHDLCRLLHFGSTVIKIAASYSLLELFKRISDQINSNHEELRCTIGYIMSIRSILEGLVFYNDLRVATNCSLCLSMILGWEKLTKETKVLEESSWCRLIIEEMTVSLAAPALASQSFMNNQRPAVLVAIALLKLHKIPQWMRSVFDNSSISGILGNLSASNLSSEILALFRELLKSNFLSTEQIATINQMLQECRKRMYSNNAQEDLPNEPIKKVLTTSYNMGDICEYLIDLMTSEAYLDTGSKKLLEEIELFFSTLSVDNGSCM

SEQ ID NO: 180 - DNA, 3043 bp, Glycine max
attcactaccttggggctcttctgaattgtgagaaggatgatgatctccatgaacacatcaaagacatgcatagtttaatttctgttattgttacgggccttcaattgccgagtgaggagattcgtggggaggttctctttgtcctttacaaactatctgttcttcagagtacatcagcagagggagatggaagtgatatgttgattcccttctgtccacagatcttgtacctgttggtcgatgttctcatgaagattcaaaatgatgatgttcgcttgaattgtgtcgatttcctgctagtatctttttctccgagagtttgcatctatagcttatatcctaaccaccaaagtttcaggctcaatgaacgagtaattgatgtcaatcattccaaggctgaatgtgcatacgatactagtagcatgccttccaatggaggagttaactcaaccgaggatggaaccaagggcacatctctggtaaatctgtttgctgaagccatcaaaggcccattactctcgtcagacagtcaagttcaaatcggcactctagatttactctttcactatttgtcttcagtcagaacttcagactatcagattcgagttttggtggaagaaaatattgcagaatatttatttaaaatattaagatcgtcaggagagaactttgaaacctttaaactaagactcgttgttggaatttctactctgatcccaacattacggtatgtggctgaagttccttttcaccctgtccaatgtgagacactgaagctcatttatgaatgcatttctgagtgccctggatctgtatcaacttttcaactagaggaactggttcttgttttgataagaatgctttctgatggggagatgggtattattccagagacgtttataatggtctgttcagtctttgttgctcttataagatctccatcttgtaatggagctttagatctgttaaaatcaattgaggaagcaacgaaccatgccattttagcttgtctctctgtctctgaaaggaatataaaccaaattttgcaatgcttgtacctacttaaagaggcatttgcatatagtcatgatggaaactccattaactctagtaagctggagcttagaagcagcattctagatatatgcagaacccatttactgccaaggcttgtagtgggcatcaatgaaatggaagaggacattgcccttggattacttgaaacttttcatttgatactgcttctgcactctagtattaatgccgtggaatttgcagagagtctgatttcaatcggttggttcagtttttcatatgaatgtctgggtttgtttacaggagataggatgaaaaatagaatatatttgttgctcagttcactcatggattctctcctgggaaatgattctggacaaccaattagagagactgctttgcacctgccttgcgatcctattgatttactctttttgcttgggcaaaggagtactaagagtttggatttgccttcttgtcaatctgctgttttgctgattatgtacactagttcgctatatgatgaaagattggcaattaattccttgacgtctattttccctaacagttttctgacttccattgccagacttgcagatgagaagttggttttagcttctcttgaacaatatattcttcttaatagtggtaattttcataatcggaccactgataatttgaccgtgacacaactggtgaatctttacagtttactaaggggattactttcagcaagaattcacacggtatcattgaagtggttgtttcaacaagagaacataatcaactcattatgccatcagattttgaaattttgcagaagctataacttagaagaggctgacataattataggaaacaataatcaaactataaatgtacagacacttgcggagttggtatcaactgaagataactatggagctagacttgtcgtgtgcctattagcacagctcttggaggaagaaggccaggaacatgacataatatgtgttctgaatgtcatggcaactatggttctcatctgtccagctgtttgtgaacaattatctttgcatggaattgcgacaaaaatcaggacttggtgttatttgaataacagcttgtcgacaagaacttacatgtccatcttgattttggtttttaacactttgagttcagtgcatcctgaaacactatctactgatcaaagttgggtagcggtaaccatgaagatgatggagtattcaattctatccaaagaggttgatatcttaagtgacgaaagtctcttcgttattggcattctttccttaattttgtatctttccaccaataaagcacttgaagagacttccaaggccattctttttaatacttgtataatctctatgggacctgctttggttgaccatgacgagggaacatgcacaggagaaactttaatatttgtaagccggttcgaatcagtaataagaaaccttttatattctagcttgcatgctatcctaccagggttcgtggattggcaaaacttctttgcttcaacgaatccatcggagccgctagccttcattggcatccgttgccatgacttgtgcagacttctgcattttggttctcctgtaatcaagattgctgcttcttatagcctgttagagttatttaacagaatatcagatcaaataaacagtgatcatgaagagttgagatgtactattgggtacttaatgcccataaggattggaaggaatgtcttagaagagagtagctggtgtagattgattatagaggagatgacagtatctttggccgctcctgctttagcatcacaatcattcacgaacaatcaaaggcctgcagtacttaaaggtattgcgttaatgaaactgcataaaatccctcagtggatgagatctgtgtttgataattcaagcatatctggcatattggagaaccttgcagctagtaacctgagctcagagattttggctttatttcgagaactactgaaatttaacttcttaa

SEQ ID NO: 181 - protein, 1015 aa, Glycine max
  misc_feature (1015)..(1015): Xaa can be any naturally occurring amino acid
IHYLGALLNCEKDDDLHEHIKDMHSLISVIVTGLQLPSEEIRGEVLFVLYKLSVLQSTSAEGDGSDMLIPFCPQILYLLVDVLMKIQNDDVRLNCVDFLLVSFSPRVCIYSLYPNHQSFRLNERVIDVNHSKAECAYDTSSMPSNGGVNSTEDGTKGTSLVNLFAEAIKGPLLSSDSQVQIGTLDLLFHYLSSVRTSDYQIRVLVEENIAEYLFKILRSSGENFETFKLRLVVGISTLIPTLRYVAEVPFHPVQCETLKLIYECISECPGSVSTFQLEELVLVLIRMLSDGEMGIIPETFIMVCSVFVALIRSPSCNGALDLLKSIEEATNHAILACLSVSERNINQILQCLYLLKEAFAYSHDGNSINSSKLELRSSILDICRTHLLPRLVVGINEMEEDIALGLLETFHLILLLHSSINAVEFAESLISIGWFSFSYECLGLFTGDRMKNRIYLLLSSLMDSLLGNDSGQPIRETALHLPCDPIDLLFLLGQRSTKSLDLPSCQSAVLLIMYTSSLYDERLAINSLTSIFPNSFLTSIARLADEKLVLASLEQYILLNSGNFHNRTTDNLTVTQLVNLYSLLRGLLSARIHTVSLKWLFQQENIINSLCHQILKFCRSYNLEEADIIIGNNNQTINVQTLAELVSTEDNYGARLVVCLLAQLLEEEGQEHDIICVLNVMATMVLICPAVCEQLSLHGIATKIRTWCYLNNSLSTRTYMSILILVFNTLSSVHPETLSTDQSWVAVTMKMMEYSILSKEVDILSDESLFVIGILSLILYLSTNKALEETSKAILFNTCIISMGPALVDHDEGTCTGETLIFVSRFESVIRNLLYSSLHAILPGFVDWQNFFASTNPSEPLAFIGIRCHDLCRLLHFGSPVIKIAASYSLLELFNRISDQINSDHEELRCTIGYLMPIRIGRNVLEESSWCRLIIEEMTVSLAAPALASQSFTNNQRPAVLKGIALMKLHKIPQWMRSVFDNSSISGILENLAASNLSSEILALFRELLKFNFLX

SEQ ID NO: 182 - DNA, 3831 bp, Medicago truncatula
atggattcagagagcatagatattgaagacgaaggcgattcacggtggtgctgttctcaaggccaccgttcatctctaaaccttcaaacaaaccaaggcggcacgatctgtctcgtgtgtttctccaacctcatctctaacccttcctctccaactatccatgtatcttacgctctctcacagctctctcgttctctctccattcctcaattccttcactctatcgtcacttttcaccctcacttccttgtttcacctctcgtcgctgctctttcctctttcgacgatgaacctatcgcagaacaactcgttcatctcatcctcaacctctctgcttcatccgatccttccgtttgccgtgagttcgtcgctagggtttcagatcgcgtttcttctggtgctttaggttggagttcgcgtcagttacactcgcttcactgcctaggggttcttctgaattgtgagaaggaggatgatctccatgtacacatcaaagatgtttatagcctcatttccgttctggttaccggtcttcaattgcctagtgaggaaattcgtggagaagtcctttttgtgctttacaaactatttgctcttcatagtacatcagatgagggtgatggaagtgatatgttgattcccttttgtccaaagcttttgtacctgttgggagatgttctcttgaagactcaaaatgatgatgttcgcttgaattgtattgcacttttgacaatgctggctcaaagacagttgctcagggaagaacctgcatatgatactgggaacatgtctttatctggtgaagttaattttaaagaaactgaagatgtaccagagggagcatctctggttaatctgttcgccgaagcaatcaaaggcccgttgctttcatcagtcagccaagtccaaatcggagctctagatttgctctttcattatttatcttcagttgggacttcaggcaatcagattcaagtcttagtggaagaaaatattgcagattatttatttgaaatattgagattatcagagaacaaggatccggcagtcaagatgtgccttcaggtacttgatctattatcgaattcagaggaagcttttagaccgaggctggttgttgggttttcaactctggttcctgtactgcgttatgtgactgaagttccttttcatccagttcaatacgagacactgaagctcatttatgaatgcatttctgagtgccctggagctgtatcaacttctcagatggaggaacttgtgcttgttttgataaaaatgcttacaaagcattctgatggggagatgggaatgattcctgagacgtttataatggcttgctcagtatttgtggctcttatgagatctccatcttgtaatggagctttagatctgtcaaaatcaattgaggaagcagtcaaacaagccatcttagcttgtctctatgtctctgagaggaatatcaaccagattttgcaatgcttctatctacttaaagaggcatatgcctacagtcatgatgaaaactccactcacataagcaaactagaacttagaagcgggattctagatatatgcagaacacatttactgccctggcttgcaacaggcatcatgaaatggaagaagaattattcctggtattattctagggaattcgcagagactttgatgtcattctgctggttcagtttttcatatgggtgtctgggattgtttgcaggtgatagaatgaaacatagaatatatttgttacttggttcactcatagattctctaataggaaatgatactggacaacctattagagatgctgctttacacctgccttctgaccctgtcgatttactctttatgctggggcaaagaagtacagatagtttagatttttcttcttgtcaatctgctgcattgctaattatgtacaccagttcattatatgatgaaagacttgcagatgataatatggctttagcttctcttgaacagtatgttcttcttaatagcagtgactctcataattggacaactgatagtttgacagtgactcgactggtgaacctctacagtttgttgaggggtcttggcaatatgaactatcaaattcactatagtcgagaagctgaggagattatattccagctcataaacaatggtgaatgggatttactttctgcaagaattcacacagtatcattaaagtggttgtttcaacaagagaatataatcaactcactgtgtcatcagattttgaaattctgcagaaacaataacttagaaggggatgacatgattattggaaacagtaaccaaactgtaaatgtacagacacttgcagagttagtatcctctgaagataactatggagctagacttttcatatgcttattggcacagctcgctgaggaagaaggccaggaacatgatataatttctgttctgaatctaatggcaactatgattcatatatgcccagctgcttctgaccaactatctttgcatggaatagggacaacaatcaggacttgttgcttctccacagcaactttcatgtccatcttggttttggtttttaacactttaagttcagtgcatcctaaaacactatcaactgatcagagctgggttgcagtaaccatggagatgatggagtactctattccatcaaaagaggcagatatcttaagtcaagaaagtctcttcgtcattggcattctttccttgattttacatctttccaccaataaagtacttaaagagacttcaaagaccattctctttaatacttgtataatctctgttgtcaatactatagtgtgtgcagcttcttcaaaaggaccggctttggttgaccatgacgagggaacaagcaccggagaaactttaatatttgttcttttgcttcatatctttgctgttaaaagcttgcacgctatccttccagggtttgtggattggcaaaaattccttgtttcaatgaattcatcagaaccactagccttcataggcatccgttgtcatgatttgtgcagacttctgcattttggttctcccgttgtcaagattattgcttcttacagcctgttagaattgttcaacagaatatcagatcaaataaacactaaacaggaagagttgaaatgtactgttgggtatttaatgtccataaggagtatattggaagggatggtattttataatgatctgagagtggctaccaattgtgcactctgtctgtcaattcttctgcgatgggaaaatctagcaaaggaaacggaacagttaggaaagagcagttggtgtagattgattatggaggagatgacagtatctttggcagctcctgctttagcatcacaatcattcatgaacaatcaaacgcctgcagtccttgtagctagtgcgttgctgaaactgcataaaatcccccagtggatgagatctgtgtttaacaattcatgcatatctggcatactggagaaccttgctgctaataatttgagcccggaaattttggttttatttcgagaactactgaaatctgacttcttaagtactgagcaaattgcaactataagtcaaatgctgcaggaatgcagaaaacaaatgtacactaacaatgctcaagacggtctcccaagtgaaccaataaagaaggtccttgccacatcatatgatcttggagatgtttgctggtttctcattgacttgatgtcaccagacacattagatatggattcctgggggattcatatggacggtaaaaggctcttggaagaaatagagttgtttttcagcaccttgactgtagatgataatagctgcagataa

SEQ ID NO: 183 - protein, 1276 aa, Medicago truncatula
MDSESIDIEDEGDSRWCCSQGHRSSLNLQTNQGGTICLVCFSNLISNPSSPTIHVSYALSQLSRSLSIPQFLHSIVTFHPHFLVSPLVAALSSFDDEPIAEQLVHLILNLSASSDPSVCREFVARVSDRVSSGALGWSSRQLHSLHCLGVLLNCEKEDDLHVHIKDVYSLISVLVTGLQLPSEEIRGEVLFVLYKLFALHSTSDEGDGSDMLIPFCPKLLYLLGDVLLKTQNDDVRLNCIALLTMLAQRQLLREEPAYDTGNMSLSGEVNFKETEDVPEGASLVNLFAEAIKGPLLSSVSQVQIGALDLLFHYLSSVGTSGNQIQVLVEENIADYLFEILRLSENKDPAVKMCLQVLDLLSNSEEAFRPRLVVGFSTLVPVLRYVTEVPFHPVQYETLKLIYECISECPGAVSTSQMEELVLVLIKMLTKHSDGEMGMIPETFIMACSVFVALMRSPSCNGALDLSKSIEEAVKQAILACLYVSERNINQILQCFYLLKEAYAYSHDENSTHISKLELRSGILDICRTHLLPWLATGIMKWKKNYSWYYSREFAETLMSFCWFSFSYGCLGLFAGDRMKHRIYLLLGSLIDSLIGNDTGQPIRDAALHLPSDPVDLLFMLGQRSTDSLDFSSCQSAALLIMYTSSLYDERLADDNMALASLEQYVLLNSSDSHNWTTDSLTVTRLVNLYSLLRGLGNMNYQIHYSREAEEIIFQLINNGEWDLLSARIHTVSLKWLFQQENIINSLCHQILKFCRNNNLEGDDMIIGNSNQTVNVQTLAELVSSEDNYGARLFICLLAQLAEEEGQEHDIISVLNLMATMIHICPAASDQLSLHGIGTTIRTCCFSTATFMSILVLVFNTLSSVHPKTLSTDQSWVAVTMEMMEYSIPSKEADILSQESLFVIGILSLILHLSTNKVLKETSKTILFNTCIISVVNTIVCAASSKGPALVDHDEGTSTGETLIFVLLLHIFAVKSLHAILPGFVDWQKFLVSMNSSEPLAFIGIRCHDLCRLLHFGSPVVKIIASYSLLELFNRISDQINTKQEELKCTVGYLMSIRSILEGMVFYNDLRVATNCALCLSILLRWENLAKETEQLGKSSWCRLIMEEMTVSLAAPALASQSFMNNQTPAVLVASALLKLHKIPQWMRSVFNNSCISGILENLAANNLSPEILVLFRELLKSDFLSTEQIATISQMLQECRKQMYTNNAQDGLPSEPIKKVLATSYDLGDVCWFLIDLMSPDTLDMDSWGIHMDGKRLLEEIELFFSTLTVDDNSCR

SEQ ID NO: 184 - DNA, 1554 bp, Oryza sativa
gtttgttccttattgatattcaacattttacattcagcaagtgcaatgacattcacctgtgatgatgatgcatggcttgctcttaccatgaagctattggattgtttcaattctagtcttgcttatacatcaagtgagcaagaatggaagatattaattgggatattgtgccttattttaaaccattcagcaaacaaggtgcttattgagcctgcaaaagccataatcttgaataattgtttggctttgttgatggatggtatagttcaagaagcttgtgcaaagggcccatctttatttcaacacaatcaggagacaacctttggggaattattgattcttatgcttttattgatatttttctctgtacgaagcctgcaagcgatcttagaggcaagcattgactggcaggaattcctgcaatattcagatgacactgagtcttcctctgttcttggcattccgtgccatgatttgtgtcgtctcatgcactttggcccttctcccgtaaagcttattgcttcacaatgcctgttggaattgcttaacagaatttcagatcagaggagctgtcttaatgctgagttaagatgctctgcaaagtatctgaagtccatgattgcagtgacagagggaatggtcttcgatcaagatagtagagttgctgaaaattgtggtgcctgtctcacggtgattttaggttgggagagatttggaagcagagagaaggcggtgatcagagaatctaaatggtctaggttaatattggaggaatttgcagttgccttgactgctcctggtttgacatccaaatccttcagtaatcagcagaagattgcagcaaatatagctctttcattgctccaactgagccaagtaccagattggttgacatcgttgttcagtgattctttgatatctggtatagttgctaatctttctgctaggaatgttaccgcggaaattgtcactctcttcagtgaacttatggccaaaaactatctcaatcaagaacacattgctggtctacacaacttgttccaggtctgcaggagacaggcctatgagggaggcggcggctcgaaggcgcagccctcggagcagaaggctgcggcggcgagatgcgccgacgacgtgcgtgctttgctcttcggcatgatgctggagcagcgggcgtgctctcgcgccaccgttgagatggagcagcagagacttctccgtgagatcgactctttcttcttccaggagtcgagcctgcgagaacagaacagcgtgaagtaacccaagtctcaaggtcttaaggccagcccccggccaacaaaccaggcacctcgtacagctcccccctaatccgtatagttttttttttttttgacattcctaatctgtatagatgcttataagtaattagggatactcacatcttccttgttgatagtgtttaaagggcgcaaaaattaatttgcccctcaatcatgaaaattgttgaagctccatgccaaaattggtctgcaaaagcaacccttaaacgaaatggaatacaccaatctttcg

SEQ ID NO: 185 - protein, 411 aa, Oryza sativa
MTFTCDDDAWLALTMKLLDCFNSSLAYTSSEQEWKILIGILCLILNHSANKVLIEPAKAIILNNCLALLMDGIVQEACAKGPSLFQHNQETTFGELLILMLLLIFFSVRSLQAILEASIDWQEFLQYSDDTESSSVLGIPCHDLCRLMHFGPSPVKLIASQCLLELLNRISDQRSCLNAELRCSAKYLKSMIAVTEGMVFDQDSRVAENCGACLTVILGWERFGSREKAVIRESKWSRLILEEFAVALTAPGLTSKSFSNQQKIAANIALSLLQLSQVPDWLTSLFSDSLISGIVANLSARNVTAEIVTLFSELMAKNYLNQEHIAGLHNLFQVCRRQAYEGGGGSKAQPSEQKAAAARCADDVRALLFGMMLEQRACSRATVEMEQQRLLREIDSFFFQESSLREQNSVK

SEQ ID NO: 186 - DNA, 3879 bp, Setaria italica
atggaacccgacggcgacacctcgccgcctcctccgccggcgccggcgccaccgcgcgcctgcggcgcgggccaccgggcgtcgcactcgctgccgacctcggcgggcggccgcgtctgcctctcctgcgccgcggcgctcctctcctccgcgggcgccgcctccacgccgtcccaccacgtcgctcacgcgctcgccagcctctccctggcgctcgccgacccggccttcctcgtgccgctccgcgccgcccacccgcgcctcctcgcggcgccgctcgccgaggcgctcgcgggcgccgccgcccgccgcgacgcggcgctcgccgcgcaggcgtccgacctcgcggccgacctcgccgccgccgtgggagcccccgccgcctcggaactcgtcgcccgcctcgcccgcgtcctctcctccggctcactcgtcaagcacctccacactctacattgtttgggggtcttgctaaacactaccaaagatggtgctgcatatataggagataaactttcgcttttcttaaatcttgttaatgacctccgactaccaagtgatgaaattcgtggagagatactcttcgtgctatacaaactctctatattaaatgccaccccatgggacaatatgtgtgataatggagatgtggatctttcagcaattggaagaaacttgcttcaactctctcttgaagtcctactcaaaactcaaaacgatgctgtccgcttgaattgtgttgcattgctccttactttagcaaagagagggccctttgacattgtgttgctcggtaatccaagttcaatcaattgcttagaagcagaacacatgcagacagattatatgtccctaaatgcttctcttgttctatttgctgaagctgtcaaaggatctctgctatctactaatctagaagttcagacagggacattgaatttgatctttcatttcctttcatctgatgcaaatatttgtgctctactccaaactttgatcaatgaaaatgttgctgattacatatttgaggttctcaggttatcaggaaagaatgatgtacttgtcatttcctctattcaagtactactacttttagccagatcagaggagaaattcaaagaaaagcttgccattggattttccaccctgcttcctgttcttcactatgttgcggagataccatttcacccggtccagtctcatgttttagaacttgtttggatctgcatggtcaattgttctggtatcctctcgctgccacaagaagaacagatagtctgtactttgactgcaatcttgagaagaaatggcaatggtgaacttggcatgagttctgagacctttattctcgtttgctcaatattgatagagattctgaagtcacctcatgctcatgatattgagaaattaccaccatttattgaagaagcatcaaaatatgctatatcttcaacattatcacatgagtatgattctatgatcctaattcctcattcccttcttcttctgaaagaagcacttctgttctgccttgaagggagcaaatataatatttctagcaagaaggatcttgaggatagcatcattgaaacttgtggaacgattttactgcattggcttgaaaatgctgtggtagatggtaatgatgatgaatcattggcagggatccttcagattttccaaattattttgtcaagggcaactgacaaaaagccattaaagtttgctgagttgctagcatcatcatcatggtttggcctgtcatttggattcatgggcttatttcctactgatcatgtaaaatcagtggtgtatttggtcactagttccattgttgacagagttttgggctgtaattatggggaagctattagagatgcacacatttatctgccatcagaccccacagaactgatgtatttgcttgggcaatgtagtacagaagacttcaacttggcatcatgccaatgcgctattctttctatactgtatgcctgctcattctacaatgaaaggcttgccgctgacaaccaaattctggcttctgttgagcaatacatcctcctcaatggtgggaacttcccacaggaaattaattgttctgtttttcttacgcttctggtccatctttatgcctttgtcagaggcatttgctgtagctgcagcattccacatagtccagaagccgagaatactctattccatgtaatgagacataaggactgggatttgcttgcaatccgagtccatccagtagcaataaaatggctctttcagaagcaagaacttatggaaccactcacattccagatgctaaatttttgcaaaactttctgtgaggatgaaactgtcatgctctcaaacagcagtcagttggtggacatacaaatggttgcagagctggtgctttctggagaaaccattgtctcatttttgctggtgtccttactaaaccagatagtaaaggagggcaccgaagatgaggtcttttcagtgatcagagttatcgctgaaatcctcatgatctctccttgttcttctgatcagtttatatcatgcggcattgtcgattcattccgttgcatatattgcttaccttactcttcaaggatcaaaacggtttgttcctatttgatctttaacaccttatgttcagcaagtgcatcgacattttctgaggaagatgaatggcttcctcttactgtgaagttattggaatttatcaattctggtattgattatacatctagtaaccaagaacgtaagatattgattgggatattatgctttgttttgcatcattcagcaaacaaagttcttgttgagcctgcaaaagccataatcttgaacagttctttggtttctttaaccgatgttatagtacacacagcatgtgcaaaaggcccatctttatttcaacacaatcaggagacagactttggagaatttatgatccttgtacttctaatggtgtttttctctctaagaagtttgcatacaattctagaggcaagtattgactggcaggacttccttcagcatccagatgatgcccaatctttttctgttcttggcattccatgccatgatttatgccgtctcatgcacttcggtccaccttctgttaaacttattgcttcacaatgcctgttggagttgctcacgagaatttcagatcaaagaacatgtactcaggctgaattaagatgctctgtgaagtatttgaagtccattattgcagtgactgagggtttggtgttcagtgaagactgtaaagttgctggaaattgcggtgcctgtctctctgtgattttaggttgggagaaatttggaagccaagagaaggtggcaactagagaatccaaatggtttcggttaataatggaggaatttgctgttgccttgacagctcctggtttgacatccaaatctttcaccaatcagcagaagtttgcagcaaatctagctgtttcattgctcaggctgagccaagtaccagattggttaacatcgctgtttgatagccatcttatatctggcattgtgactaatctttctgctaggaatgttaccgcagaaattgtcaatctcttcactgagctcatggctaggaaatatctgagtcaagagcacattgttgcactgcataacttgttccaggtgtgcagaagtcatgtctatgagggaagctccaaggcgcaaatgttggagcagaatgttaaaaaggtcgcgagaagcaccgatgacgtgcttgccttgctctttggcttgatgctgaaccagtgcacggagtctggcgtggttcaaccggagcagcagagactcctccgtgcgattgatctgtttgtccaggagtcgagcgggagagaacaacgttaa

SEQ ID NO: 187 - protein, 1292 aa, Setaria italica
MEPDGDTSPPPPPAPAPPRACGAGHRASHSLPTSAGGRVCLSCAAALLSSAGAASTPSHHVAHALASLSLALADPAFLVPLRAAHPRLLAAPLAEALAGAAARRDAALAAQASDLAADLAAAVGAPAASELVARLARVLSSGSLVKHLHTLHCLGVLLNTTKDGAAYIGDKLSLFLNLVNDLRLPSDEIRGEILFVLYKLSILNATPWDNMCDNGDVDLSAIGRNLLQLSLEVLLKTQNDAVRLNCVALLLTLAKRGPFDIVLLGNPSSINCLEAEHMQTDYMSLNASLVLFAEAVKGSLLSTNLEVQTGTLNLIFHFLSSDANICALLQTLINENVADYIFEVLRLSGKNDVLVISSIQVLLLLARSEEKFKEKLAIGFSTLLPVLHYVAEIPFHPVQSHVLELVWICMVNCSGILSLPQEEQIVCTLTAILRRNGNGELGMSSETFILVCSILIEILKSPHAHDIEKLPPFIEEASKYAISSTLSHEYDSMILIPHSLLLLKEALLFCLEGSKYNISSKKDLEDSIIETCGTILLHWLENAVVDGNDDESLAGILQIFQIILSRATDKKPLKFAELLASSSWFGLSFGFMGLFPTDHVKSVVYLVTSSIVDRVLGCNYGEAIRDAHIYLPSDPTELMYLLGQCSTEDFNLASCQCAILSILYACSFYNERLAADNQILASVEQYILLNGGNFPQEINCSVFLTLLVHLYAFVRGICCSCSIPHSPEAENTLFHVMRHKDWDLLAIRVHPVAIKWLFQKQELMEPLTFQMLNFCKTFCEDETVMLSNSSQLVDIQMVAELVLSGETIVSFLLVSLLNQIVKEGTEDEVFSVIRVIAEILMISPCSSDQFISCGIVDSFRCIYCLPYSSRIKTVCSYLIFNTLCSASASTFSEEDEWLPLTVKLLEFINSGIDYTSSNQERKILIGILCFVLHHSANKVLVEPAKAIILNSSLVSLTDVIVHTACAKGPSLFQHNQETDFGEFMILVLLMVFFSLRSLHTILEASIDWQDFLQHPDDAQSFSVLGIPCHDLCRLMHFGPPSVKLIASQCLLELLTRISDQRTCTQAELRCSVKYLKSIIAVTEGLVFSEDCKVAGNCGACLSVILGWEKFGSQEKVATRESKWFRLIMEEFAVALTAPGLTSKSFTNQQKFAANLAVSLLRLSQVPDWLTSLFDSHLISGIVTNLSARNVTAEIVNLFTELMARKYLSQEHIVALHNLFQVCRSHVYEGSSKAQMLEQNVKKVARSTDDVLALLFGLMLNQCTESGVVQPEQQRLLRAIDLFVQESSGREQR

SEQ ID NO: 188 - DNA, 3939 bp, Sorghum bicolor
atggagtccgacggcgacacgtcgccacctcgcccgcctacgccggcgccactgcgtgcctgcggcgcgggccacccggcatcgcactcgctgccgacctcggcgggcggccgcgtctgcctctcctgtgccgcggcgctcctctcctccgcgggcaccgcctccacgccatcccaccacgtcgcgcacgcgctcgccaacctctccctggcgctcgccgacccggcgttcctcaggccgctccgcgccgcgcacccacgcttcctcgcggcgccgctcgccgaggcactcgagggcgccgccgaccgccgcgatgccgcactcgccgcgcaggcgtgcgacgtcgcggccgacctcgccgccgttgtgggctcccccgctgattcagagctcgtcgcccgcctcgcccgcgtcctctcctccggctcactcgtgaagcatctccatacgctacattgtttggggcttttgctaaactctaccaaagatgctgcagcatatataggggacaaatgttctcttttcttaaaccttgttaatgatctccgacttccaagcgatgaaattcgtggagagatactctttgttctatacaaactcgctatactaaatgccaccccatgggacaatatatgtcaaattgaagatttggaccttctggcaattggtagaagcttgcttcagctctctcttgaagtcctactcaaaactcaaaatgatgctgttcgcctgaactgtattgcattgctccttactttagcaaagaaggagccctttgatcatttgctgattagcttccagagttctaacaactgcatagaagcagagtccatgcagacagattatatgtccctgaatgcttctcttgttctattcgctgaggctgtcaaaggatctctgctatctactaacctagaagttcagacagggacattggatttgatctttcatttcctgtcatctgatgcaaatatttgtgctctacttcaaattttgatcgatgaaaatgttgccgattacatatttgaggttctcaggttatcaggaaataatgatctacttgtcatttcctctattcgagtactattactttttgcgagattggaggaaaaattcaaagaaaagcttgccattggattttccactcttcttcctgttcttcactatgttgcagagataccatttcacccagtccagtcccatgttttacgacttgtttggatttgcatggtcaattgttccggtatcctctcaatgccccaagaagaacagatagcctgtactttgactgcaatcttgagaagaaatgtcaatggtgaacttgacatgagttctgaaacttttattctggtttgctcaatattaatagagattctgaagtcacctcatgctcatgatattgagaaactaccatcatttattgaagaagcatcaaaatatgcgatatcttcaacattgtcacatgagtgtgattctatgatcctcattcttcattctcttcttcttctgaaagaagcacttatattctgccttgaagggagcaaatacagtattgctagcacgaaggatcttgaggatagcatcatgggaacttgtggaactattttactgcaatggcttcaaagtgctgtggttgacggtaatgatgaagaaacattggcagagatccttcagattttccagattattttgtcaagggcatctgacaaaaagccgttaaagtttgctgaattgctagcatcatcatcatggtttagcttgtcatttggattcatgggcttatttcctactgatcgtgtaaaatcagtagtatatttggtcactagttcaattgttgacagggttttgggatgtaattatggagaaacaattcgagatgcacacatttatctaccatcagaccctacagaaatgatgtatttacttgggcaatgtagcacagaagacttcaacttggcatcatgccaatgtgctattctttctatattgtatgcctgttcattctacaatgaaaggctctgtgctaacaaccaaattctggcttctgttgagcaatacatcctcctcaatggtgggaacttcccatatgaaattaatggttctattatgcttacgcttctggtccatctttatgcctttgtcagaggcatttcctatagctgcagcattccatatagtccagaagccgagaatacactattccacttaatcatacataaggactgggatttgcttgtgacccgagtccattcggtagcaataaaatggctctttcagaaacaagaaattgtggaaccactcgccttccagatgctaaagttttgtaaaactttctgtgaagatgaaactgtcatgctctcaaacagcagtcagtcggtggacatacaaatgatttccgagcttgtactttctggagaaaccaccatctcatctttgctggtttccttgctagaccagatggtaaaggagggtacagaagatgagtttatatcatgtggtattgtcggttcattccatggcatatattgcttaccatactcttcaagcagcagaacagtttgttcctatttgatctttaacatcttacgttcagcaagtgcatcaacatttggccaggaagatgaatggcttcctcttgctctaaagttattggaatttatcacttcgggtattgactatacatctagtggccaagaacacaagatagtagttgggatactatgccttgttttgcatcattcatcaagtgaatttcttattgagcctgcaaaagccataatcttgaacagttctttggtttctttaacggatgccatagtaaacaaagcttgtgttaaaggcccatcattatttcaacacaaccaggagacaacctttggagaattcctgattcttgtacttctattggcgttcttctctctaagaagcttgcacaccattctagaggcaagtattgactggcaggacttccttcagcattcagatgatgtccagtccttttctgttctcggcattccatgccatgatttatgtcgtctcatgcactttggttcaccttctattaaacttattgcttcacaatgcctgttggagttgctcaagcgaatttcagatcaaaggtcatgtattgatgctgagttaagatgctctacgaaatatttgaagtccattattgcagtgacagagggtttgttgttcagtgaagacagtaaagttgctggaaattgcagtgcctgtctctctgtgattttaggatgggagaaatttggaagccaagagaaggtggcagtcagagaatctaaatggttcaggctaataatggaggaatttgttgtggccctgactgctcctggtttgacgtccaaatctttcaccagtcagcagaagtttgctgcaattatagctgtttcgttgctcaggctgagccaagtgccagattggctgacatcgttgtttgatgggcatctgatatctggcatcgtggctaatctttctgctaggaatgttactgcagaaatcgtcattctcttcagtgagctcatggctaggaagtatctcagtcaagagcacattgttgatctacataacttgttccaggtgtgcagaagacaggtctacgagggaagctccaaagcagcattgccagagcaaagggttgaaaaagtcgcgagaagcaccaatgacgtgctcgcatcgctctttgccctgatgaaccagtgcgcagagtccggcacggttcaagcggagcagcagagactcctgcgtgcgattgacctgttcttccaggagtctagcaggagagaacagcaatgttatgttacagctacttccccaccacagcgccaagacacaacaatgcctggggattctggaccaagacagggtcgcccaagcgtgaacacatccggctcagaatggatccggatccggcccgagtga

SEQ ID NO: 189 - protein, 1312 aa, Sorghum bicolor
MESDGDTSPPRPPTPAPLRACGAGHPASHSLPTSAGGRVCLSCAAALLSSAGTASTPSHHVAHALANLSLALADPAFLRPLRAAHPRFLAAPLAEALEGAADRRDAALAAQACDVAADLAAVVGSPADSELVARLARVLSSGSLVKHLHTLHCLGLLLNSTKDAAAYIGDKCSLFLNLVNDLRLPSDEIRGEILFVLYKLAILNATPWDNICQIEDLDLLAIGRSLLQLSLEVLLKTQNDAVRLNCIALLLTLAKKEPFDHLLISFQSSNNCIEAESMQTDYMSLNASLVLFAEAVKGSLLSTNLEVQTGTLDLIFHFLSSDANICALLQILIDENVADYIFEVLRLSGNNDLLVISSIRVLLLFARLEEKFKEKLAIGFSTLLPVLHYVAEIPFHPVQSHVLRLVWICMVNCSGILSMPQEEQIACTLTAILRRNVNGELDMSSETFILVCSILIEILKSPHAHDIEKLPSFIEEASKYAISSTLSHECDSMILILHSLLLLKEALIFCLEGSKYSIASTKDLEDSIMGTCGTILLQWLQSAVVDGNDEETLAEILQIFQIILSRASDKKPLKFAELLASSSWFSLSFGFMGLFPTDRVKSVVYLVTSSIVDRVLGCNYGETIRDAHIYLPSDPTEMMYLLGQCSTEDFNLASCQCAILSILYACSFYNERLCANNQILASVEQYILLNGGNFPYEINGSIMLTLLVHLYAFVRGISYSCSIPYSPEAENTLFHLIIHKDWDLLVTRVHSVAIKWLFQKQEIVEPLAFQMLKFCKTFCEDETVMLSNSSQSVDIQMISELVLSGETTISSLLVSLLDQMVKEGTEDEFISCGIVGSFHGIYCLPYSSSSRTVCSYLIFNILRSASASTFGQEDEWLPLALKLLEFITSGIDYTSSGQEHKIVVGILCLVLHHSSSEFLIEPAKAIILNSSLVSLTDAIVNKACVKGPSLFQHNQETTFGEFLILVLLLAFFSLRSLHTILEASIDWQDFLQHSDDVQSFSVLGIPCHDLCRLMHFGSPSIKLIASQCLLELLKRISDQRSCIDAELRCSTKYLKSIIAVTEGLLFSEDSKVAGNCSACLSVILGWEKFGSQEKVAVRESKWFRLIMEEFVVALTAPGLTSKSFTSQQKFAAIIAVSLLRLSQVPDWLTSLFDGHLISGIVANLSARNVTAEIVILFSELMARKYLSQEHIVDLHNLFQVCRRQVYEGSSKAALPEQRVEKVARSTNDVLASLFALMNQCAESGTVQAEQQRLLRAIDLFFQESSRREQQCYVTATSPPQRQDTTMPGDSGPRQGRPSVNTSGSEWIRIRPE

SEQ ID NO: 190 - DNA, 3714 bp, Vitis vinifera
atgatgttggaggaggaggaagaagaagtgtatccagcaacatgctcacagggccacagatccaccctcatcctccaaaccatggaaggaggcagaatctgcctcatctgctttaccaacctcctctccaaccctacttcccccaccttccacgtctctcacgccctctctcagctttcccacgccctctctcaccccccttttctccattcccttctctcccaccaccctcaccttctcgtctcccctcttcttcactccctctccttcttcaacgaccattccatcgcctcccagatcattcatctcgttctctttctctctaattcttctcattcttcttccctttatggggagtttgtctctcggattgcctccatcctctcaggttctaagctccactggagtccgcgccaggcctctatgcttcattgcttaggggttctcttgaactgtgagacgaataatccttatgcccacatcaaagacaaaagtgcccttgtcttcaaccttgttgcaggtcttcagttgcctagtgaagagatccagggggagatcctgtttgttctctacaaactatctatcctccaatatgcatctgaggagggtgatgggtctgaccttttattttccttttgccccaagctcttgcacttgtcaatggaagctcttatgaagacccaaagtgatgatgttcgtttgaattgtgtagcactcttgacagtgttggctcaaaggggttactttgagaatgcatttgctaatgacataagcattagggattgctgtgaagctgataacttcatggaagtgacagaacatgaaaaagatgtgcttcctctgaatatcttgtttgctgaagctatcaaaggcccactactttcttcggatagtcaacttcaacttggcgcactggatttgatcttttattatttatcatgggaaaggggttcaagcaaacggattcaagtcttggtggaagaaaacattgcagattatgtatttgaaatactaagattgtcagagtgcaaggacccagtggttaactcctgccttcgagttcttgatcttttatcaatagctgagcatgcttttggacaaagacttgctattggattcactacactgcttcctgttctgcagtatgtagttgaagttccttttcatcctgttcaaactccaacactgaagctcattaggaattgcattttgaactaccctggaatggtatccattacacaaattgaagaaataggtcttatcttgacaaggatgcttagaagacatattaatggggacgtggacatgcttccagagacgttgattattgcatgctcaatccttgtagatctcatgaagtctccttcttctcatgaggctttaactctcagaacaatagttcaagaatcagttagacatgccattttagcttctctatgcctctatgagaaacatcccaatcaaattttgcactccctttacttactgaaagaggcatatgcattcagtcatgaagggaactccactaaaaacgaagctaacctggaattaggaaattgtattattgatgtttgtagaacacatttactaccttggtttgcaacagccatcaatgaaatggaatatgaggaaattgtcttgggagtactggaagcctttcattcagtactgcttcaggattcttatgcacaagcaaaggaatttgtgatgattctggtttcatcctcttggttcagtttgtcatttggatgtttaggattatttcctagtgaaaagatgaaatggagagtatatctgatgttcagttcaattgtggatgttcttctgggaaatgaatctggacaacccattagagatgcggctttatatctaccatctgatccttctgatttgttgtttttgctgggtcagaagagcacccaaaatctagaactattgtcttgtcaatctgcagttctgctgatactatataccagctctttatatgatgaaagacttgcagatgagaagctggttttagcttctctggagcaatacattttagtcaacaacagtgatttgctatgtggagctgctgattcagtgtcaataacacgactgatgaatctttacggcttgtaccggggtcttgcaaaggtcggctatcaaattccctacagtccagaggctgagaggatcctcttcgagctagtggctcaaaatgaatgggatttgtcttctgcaactataaacttcacatcattgaaatggttgtttcagcaagagaaaatcattaagccattgtcttatcaaatactaaaattctgcagaaataatagctcaagtgggtcacacatcatcatccatggaaacgacagccaaaacatagatgtacaaggacttgcaaagttggtagcagcaggagataacttgggtgcagtgctcttggtatctttattgcaacagcttatagaggaagaaggcaatgaatgcgacatcatttcagtagtgaatctcatggtagacatcatcaacattttcccagctgcttcagaccaattatccatgcatggcataggcaatgggatccaggatcttttttcccattcgagccattctttgtcccaacagatgtttgttgccattgcaattctaatttttgacattttatggtcagtgcaacctgaaacactttctgatggtgaaacttggctttcagtgaccatgaagttaatggggtacttgatccccatggtgactgcagggggttggactcaagaaagtctcttagtactcggtattctttccttgatcttgcatcattccaccaaccaagcccttgtagaagcttcaaaagccatacttctgaatgattcccttgtctccatgatcaacaatgtgatccatacaagctgttcaaagggacctgctctaattgaagatgatgaggaaacaagaaatggagaaactttaacatttgtgcttttactacactttttctcttgtagaagttttaatgctgttctaccaggtactctggactggcaaaatctcctcgatccatcaaacaagactcagccactttccttgattagtattcactgccatgacctgtgcagactgatgcattttgggtctcctctggtcaagctggttgcttcatattgtctgatggagttgtttaccagaataacagacctgagaaacagaaaacacgatgaattaaaatggaacatggggcatctaatttctgtaatggctatattagaaggattggttttttacagtgacattagagtggctatgaactgtgccctctgcttatcaatgattctggggtgggaaaagttatggatgcaggacacaaaagtaattggaaggtgtaactggtgcaggctaattgttgaagagctggctatgtctttggcagttccttctttggcgtcaaaatcatttatgaatcatcacaaacctgcggttcatgtagctgtagcattgctgaaactgcacagcattcctgggtggatgaagtctgtgtttgatgattcctgcatttctggtataattgaaaacctttcagtcagtaatgtgagcatggagacagtgcttctgtttcgggaattactgaaccatgagtacctgaaggatgagcaaattgcctgcctaaatcgggttttccaggtgaaattttcttatcctatctcatgctctatgcactgcttttctctagtttga

SEQ ID NO: 191 - protein, 1237 aa, Vitis vinifera
MMLEEEEEEVYPATCSQGHRSTLILQTMEGGRICLICFTNLLSNPTSPTFHVSHALSQLSHALSHPPFLHSLLSHHPHLLVSPLLHSLSFFNDHSIASQIIHLVLFLSNSSHSSSLYGEFVSRIASILSGSKLHWSPRQASMLHCLGVLLNCETNNPYAHIKDKSALVFNLVAGLQLPSEEIQGEILFVLYKLSILQYASEEGDGSDLLFSFCPKLLHLSMEALMKTQSDDVRLNCVALLTVLAQRGYFENAFANDISIRDCCEADNFMEVTEHEKDVLPLNILFAEAIKGPLLSSDSQLQLGALDLIFYYLSWERGSSKRIQVLVEENIADYVFEILRLSECKDPVVNSCLRVLDLLSIAEHAFGQRLAIGFTTLLPVLQYVVEVPFHPVQTPTLKLIRNCILNYPGMVSITQIEEIGLILTRMLRRHINGDVDMLPETLIIACSILVDLMKSPSSHEALTLRTIVQESVRHAILASLCLYEKHPNQILHSLYLLKEAYAFSHEGNSTKNEANLELGNCIIDVCRTHLLPWFATAINEMEYEEIVLGVLEAFHSVLLQDSYAQAKEFVMILVSSSWFSLSFGCLGLFPSEKMKWRVYLMFSSIVDVLLGNESGQPIRDAALYLPSDPSDLLFLLGQKSTQNLELLSCQSAVLLILYTSSLYDERLADEKLVLASLEQYILVNNSDLLCGAADSVSITRLMNLYGLYRGLAKVGYQIPYSPEAERILFELVAQNEWDLSSATINFTSLKWLFQQEKIIKPLSYQILKFCRNNSSSGSHIIIHGNDSQNIDVQGLAKLVAAGDNLGAVLLVSLLQQLIEEEGNECDIISVVNLMVDIINIFPAASDQLSMHGIGNGIQDLFSHSSHSLSQQMFVAIAILIFDILWSVQPETLSDGETWLSVTMKLMGYLIPMVTAGGWTQESLLVLGILSLILHHSTNQALVEASKAILLNDSLVSMINNVIHTSCSKGPALIEDDEETRNGETLTFVLLLHFFSCRSFNAVLPGTLDWQNLLDPSNKTQPLSLISIHCHDLCRLMHFGSPLVKLVASYCLMELFTRITDLRNRKHDELKWNMGHLISVMAILEGLVFYSDIRVAMNCALCLSMILGWEKLWMQDTKVIGRCNWCRLIVEELAMSLAVPSLASKSFMNHHKPAVHVAVALLKLHSIPGWMKSVFDDSCISGIIENLSVSNVSMETVLLFRELLNHEYLKDEQIACLNRVFQVKFSYPISCSMHCFSLV

SEQ ID NO: 192 - DNA, 4224 bp, Zea mays
cttctgctacagcgataccttttgccgtaaaaagtactgcagaggaactcgttaccccatggaatccgacggcgacacgtcgccacctcgcccgcctacgccggcgccagtgcgtgcctgcggcgcgggccacccggcatcgcactcgctgccgacctcggcgggcggccgtgtctgcctctcctgtgtcgtggcgctcctctcctccgcgggcaacgcctccacgccatcccaccacgtcgcgcacgcgctggccaacctctccctggcgctcgccgacccggcattcctcaggccgctccgcgccgcgcacccacacctcctcgcggcgccgctcgccgaggcgctcgagggcgccgccgaacgccgcgatgccgcgctcgccgcgcaggcgtgcgacgtcgcggccgacctcgccgccgtcgtgggcgccccggctgattcagagctcgtcgcccgccttgcccgcgtcctctcctccggctcactcgtcaagcacctccatacgctacattgtttggggcttttgctgaactctaccaaagatgctggagcatatataggggacaaatgttctcttttcttaaatcttgttaatgatctccgacttccaagcgatgaaattcgtggagagatactctttgttctatacaaactcgctttactaaatgccaccccatgggacgatatatgtgaaactggagatttggaccttctggcaattggtagaagcttgcttcaactctctcttgaagtcctactcaaaactcaaaatgatgctgttcgcttgaactgtattgcattgctccttactttagcaaagaaggagccctttgatcatttgctgatcagcaaccagagttctaacaaatgcatagaagcagagtccatgcagacggattatatgtccctaaatgcttctcttgttctattcgctgaggctgtcaaaggatctctgctatctactaacctagaagttcaggcagggacattggatttgatctttcatttcctgtcatctgatgcaaatatttgtgctctacttcaaactttgatcgatgaaaatgttgctgattacatatttgaggttctcaggttatcagagataccatttcacccagtccagtcccatgttttacgacttgtttggatttgcatggccaattgttctggtatcctctcactgccccaagaagaacagatagcctgtactttgactgcaatcttgagaagaaatctcaatggtgaacttgacatgagttctgaaacttttattctggtttgctcaatattaatagagattctgaagtcacctcatgctcatgatattgagaaactaccatcatttattgaagaagcatcaaaatatgcgatatcttctacattgtcacatgggtatgattctacgatcctcagtactcattctcttcttcttctgaaagaagcacttatattctgccttgaagggagcaaatacaatattgctagaacgaaggatcttgaggatagcatcatgggaacttgtggaacaattttactgcaatggcttgaaagtgctgtggttgacggtaatgatgaagaaacattggctgagatccttcagattttccaaattattttgtcaagggcatctgacaaaaagccattaaaattcgctgaattgctagcatcatcatcatggctctgtgctaacaaccaaattctggcttctgttgagcaatacatcctcctcaatggtgggacctttccatatgaaatcaatggttccattatgcttacgcttctggtccatctttatgccttcatcagaggcctttcccatagctgcagcattccacacagtccagaagccgagaatacactattccacttaatcatacacaaggactgggatttgcttgtgattcgagtccattcggtagcaataaaatggctctttcagaagcaagaaattatggaaccactcgccttccagatgctaaagttttgtagaactttctgtgaagatgaaactgtcatgctttcaaacagcagtcagttggttgacatgcaaatgattgcggagcttgcactttctggagaaaccaccatctcgtctttgctggtgtccttgctagaccagatgctaaaggagggtacagaagatgagttattttcagttgtcagtgttatcgctgaaatcctcatgatctctccatgttcttccgatcaatttatatcatgtggtattatcggttcattccatggcatatattgcttaccatactcttcaaggagcagaacagtttgttcctatttgatctttaacatcttatgctcagcaaatgcatcaacatttggccaggaagatgaatggcttcctcttgttctaaagttattggaatttatcagttcgggtattgattatacctctagtggccaagaacacaagatagtagttgggatactatgccttgttttacatcattcgtcaagcaactttcttattgagcctgcaaaagccataatattgaacagttctttggtttctttaacagatgttgtagtaaacaacgcttgtgttaaaggcccatctttatttcaacacaatcaggagacaacctttggagaattcctgattcttgtacttctattggtgttcttctctctaagaagtttgcatagcattctagaggtaagtattgactggcaggacttccttcagcattcagacgatgtccagtcattttctgttctcggtattccatgccatgatttatgccgtctcatgcacttcggttcaccttctattaagcttattgcttcacaatgcctgttggagttgctcacgagaatttcagatcaaaggtcatgtaataatgctgagttaagatgctctgtgggatatttgaagtccattattgcagtgacagagggattggtgttcagtgaagacagtaaagttgctggaaattgcagtgcctgtctctctgtgattttgggatgggagaaatttggaagccaagaaaaggtggcagtcagagaatctaaatggtttaggctaataatggaggaatttgttgtggccttgactgctcctggtttgacgtcgaaatctttctccagtcagcagaagtttgctgcgaatatggctgtttcgttgctcaggctgagccaagtgccagattggctgacatcgttgtttgatgggcatctgatatctggcatcgtggctaatctttctgctaggaatgttactgcagaaatcatcaatctcttcagtgagctcatggctaggaagtatctcagtcaagagcacattgttgatctacataacttgttgcaggtgtgcagaagccaggtctacgagggaagctccaaagcaccgttgccagagcaaagggttgaaaaagtcgcgagaagcaccaatgacgtgctcgcatctctctttggcctgatggtgaaccagtgcacagactctggcacggcgcaagcggagcagcagagactactgcatgcgattgacgtgttcttccaggagtcgggcaggagacaacagcaacatgctacagctcgacaagagacagtgccaggggattatggaccaagacagggcagcagggcccgtcgccccaaagagaagatatccggtccaggatggatccggatccggcactagtgagcctacgcctacgcctgcgctcgtgaccgatgccggccgtgcccaggttgctgctggcttgtgttcggagctcccacgcttgatttgtggggaattccggcgatcagctccgccgctcccatctcacgagtcacgaactacatccgcttccaaagaaacatgatatcttgaatcctaagtcatgaatcctgagtcagaaactctagtgaagtcgcaactactcgacgtgttttaagtttttaaggagccgtaaatttagctcttgtatttaacgagctcctcgcgaaccggaatgagctgaggaagcccaaaactgatgcccacaacaagcacaaagccaacagcccaacactaacaagaccctacgtttatctcttcctattgatttcaccctgaccctgcgccaacggcttgctgccagccatggtcttgtgctaatcgcttcttgtccggttcctacccatgcttagtgtgaccctagtgttgtctgcttcgacaccaataggtaacacgaacactaaacaagcttatccatggtcatcaagcagtctattaccttccca

SEQ ID NO: 193 - protein, 1199 aa, Zea mays
MESDGDTSPPRPPTPAPVRACGAGHPASHSLPTSAGGRVCLSCVVALLSSAGNASTPSHHVAHALANLSLALADPAFLRPLRAAHPHLLAAPLAEALEGAAERRDAALAAQACDVAADLAAVVGAPADSELVARLARVLSSGSLVKHLHTLHCLGLLLNSTKDAGAYIGDKCSLFLNLVNDLRLPSDEIRGEILFVLYKLALLNATPWDDICETGDLDLLAIGRSLLQLSLEVLLKTQNDAVRLNCIALLLTLAKKEPFDHLLISNQSSNKCIEAESMQTDYMSLNASLVLFAEAVKGSLLSTNLEVQAGTLDLIFHFLSSDANICALLQTLIDENVADYIFEVLRLSEIPFHPVQSHVLRLVWICMANCSGILSLPQEEQIACTLTAILRRNLNGELDMSSETFILVCSILIEILKSPHAHDIEKLPSFIEEASKYAISSTLSHGYDSTILSTHSLLLLKEALIFCLEGSKYNIARTKDLEDSIMGTCGTILLQWLESAVVDGNDEETLAEILQIFQIILSRASDKKPLKFAELLASSSWLCANNQILASVEQYILLNGGTFPYEINGSIMLTLLVHLYAFIRGLSHSCSIPHSPEAENTLFHLIIHKDWDLLVIRVHSVAIKWLFQKQEIMEPLAFQMLKFCRTFCEDETVMLSNSSQLVDMQMIAELALSGETTISSLLVSLLDQMLKEGTEDELFSVVSVIAEILMISPCSSDQFISCGIIGSFHGIYCLPYSSRSRTVCSYLIFNILCSANASTFGQEDEWLPLVLKLLEFISSGIDYTSSGQEHKIVVGILCLVLHHSSSNFLIEPAKAIILNSSLVSLTDVVVNNACVKGPSLFQHNQETTFGEFLILVLLLVFFSLRSLHSILEVSIDWQDFLQHSDDVQSFSVLGIPCHDLCRLMHFGSPSIKLIASQCLLELLTRISDQRSCNNAELRCSVGYLKSIIAVTEGLVFSEDSKVAGNCSACLSVILGWEKFGSQEKVAVRESKWFRLIMEEFVVALTAPGLTSKSFSSQQKFAANMAVSLLRLSQVPDWLTSLFDGHLISGIVANLSARNVTAEIINLFSELMARKYLSQEHIVDLHNLLQVCRSQVYEGSSKAPLPEQRVEKVARSTNDVLASLFGLMVNQCTDSGTAQAEQQRLLHAIDVFFQESGRRQQQHATARQETVPGDYGPRQGSRARRPKEKISGPGWIRIRH

SEQ ID NO: 194 - DNA, 799 bp, Brassica napus
gaatcaaatattttcgttggtttcctgaccgtggaaaagacccaactgtaaataaaattcacaatctcaagcattcaaaatgtacacgcttacataacgtttatacacgcagagttagtttacctgttgacattacaaagacagagtaatatctactacatcaattaaaaagctagagaagaagaggtagtaagaaagaggaggcgagccaagcagtcacatggaaggagcctggcaaaagtgttgcagaagccgatctggtagggtgctgtgtggccttctgtatcctgaatcctctccttttccttatgaaaacgccaagcttcctcggtacaccgacttcatcattgacatgagctgaaaaggtatcattctgggtaggctaagattttgtccaaaatggctggctcgacctccctgaaagatgtgacttgaccaactcgtttagctaactcccctgtgactcggtccatgaaaagaagatacaacccgtttctttcttccaacgcagctactgctttcctcgtgtggacaactgatgatatccactcctcaaacacaacagtttcaaatgcttcattctctgcccacgataacaaatagtcacttatcaggaactcaattaactgtatcaatataaacatgcactcatccatctctgggaatgattcatcaaacgggtccatgaccagtaagttctcggctaaaatagatattctctgagaaatagcaaatattgcacgctgtccaatgtatggatcacttcccagtttacggatcaaatgttggacatataacc

SEQ ID NO: 195 - DNA, 1236 bp, Brassica rapa
atggagaaggagaaggaagagtcactgagactggcgatcgccgtttctctcctacgatcgaagatccagaaccgtctatcttcttcctctacttctctctgcgatgctccctccgaaaccgatcatcttcgctggaagcagaagaaccgtcgatcgtcctcctctacttctcgttgcggtgctcctccctccgaaaccgatgctcttcgatggaagcagaaggcgaaagagaggaagaaagagataatcagactccgggaagatctcaaggatgctgaaagttgtgatttgttcccagcgaatgcttcttgcaagtgttatttctttgataacttgggagaattcagcggcaggaggattggagaggcctctgagccgaggtttaacgatgctcttcgtcgtagatttctcagaataggtcttgtgctgtcatttgatttcctagcaaggataaggggaagaaggaaatcaactcgaccatctcaaagattgcggctttcagagcctgaatatgaagacgaagcagagcagctaaggatatctattgattttctcctggaactgtcccaagcggcggactccagtgttaggctttattgcttaagctattttctggtgtctaatttctgcaactggtcacatcaggctgtagatttcatattagcttcactgaagaagctgatatcgatggggagaaacttgggatctgttgaagaatctattagtttcatgattacacagttgatcgcaagaatttgcactccctttaaaggaaatgaggtgaaacaactagaaactagtgttggattttatgtccaacatttgatccgtaaactgggaagtgatccatacattggacagcgtgcaatatttgctatttctcagagaatatctattttagccgagaacttactggtcatggacccgtttgacgaatcattcccagagatggatgaatgcatgtttatattgatacagctagttgagttcttgatatgtgattatttgttaacgtgggcagagaatgaagcatttgaaactgttgtgtttgaggagtggatatcatcagttctccacgcgaggaaagcagtagctgcgttggaagaaagaaacgggttgtatcttcttttcatggaccgagtcacaggggagttagctaaacgagttggtcaagtcacatctttcagggaggtcgagccagccattttggacaaaatcttagcctaccaagaatga

SEQ ID NO: 196 - protein, 411 aa, Brassica rapa
MEKEKEESLRLAIAVSLLRSKIQNRLSSSSTSLCDAPSETDHLRWKQKNRRSSSSTSRCGAPPSETDALRWKQKAKERKKEIIRLREDLKDAESCDLFPANASCKCYFFDNLGEFSGRRIGEASEPRFNDALRRRFLRIGLVLSFDFLARIRGRRKSTRPSQRLRLSEPEYEDEAEQLRISIDFLLELSQAADSSVRLYCLSYFLVSNFCNWSHQAVDFILASLKKLISMGRNLGSVEESISFMITQLIARICTPFKGNEVKQLETSVGFYVQHLIRKLGSDPYIGQRAIFAISQRISILAENLLVMDPFDESFPEMDECMFILIQLVEFLICDYLLTWAENEAFETVVFEEWISSVLHARKAVAALEERNGLYLLFMDRVTGELAKRVGQVTSFREVEPAILDKILAYQE

SEQ ID NO: 197 - DNA, 1089 bp, Brassica rapa
atgagttcgagcttcgctgaagcaaatcagatggagaaggaagagtcgctgaaactggcgatcgctgtttctctgattcaatcgaagatccagaaccgtagatcttcttctgatgctcttcgctggaagcacaaggctaaagagaggaagaaagagataatgagactccaggaagatctcaagcatgctgaaagttgtgatttattcccagagaatgcttcttgcaagtgttacttctttgataacatgggagagttcagcgacaggcggtttggagaggcctctgaaccgagattcagtgatgttcttcgtcgtagatttatcagattagcaaggacaagggggagaaggaaatcaactcgaccatctcaaagattgcggctctcagaaccgggatatgtagaggaagcagagcatctaaagatttctattgattttctactggaacttgctgaagcagactccaattgctctaatttcagcaattggtcacatatggctgtagatttcatattagcttcactgaagaagcttatatcgatggggagaaacttggaagctgttgaagaatctattagtttcatgattacacagttgatcaaaagaatgtgcactccctttataggaaatgaggtgaaacaattagaaacaagtgccgggctttatgttcaacatctgatccgtaaactcggaagtgatccatacattggacagcgtgcaatattttctgtctctcagagactatccattttagccgaaaacttactggtcatggacccgtttgatgaatcattcccagagatggatgagtgcatgtttatattgatacagcttactgagttcctgatatgtgactatctgctaccttgggctgagagtgaagcatttgaaactgttgtgtttgaggagtggatagcatcagtaatccatgcgaggaaagcagtagctgctttggaccaaagaaacggattgtatcttctttacatggaccgagtcacaggggaactagctaaacgagttggtcaagtcacatctttccgggaggtggagccatccattttggacaaaatcttagcctacccagaatga

SEQ ID NO: 198 - protein, 362 aa, Brassica rapa
MSSSFAEANQMEKEESLKLAIAVSLIQSKIQNRRSSSDALRWKHKAKERKKEIMRLQEDLKHAESCDLFPENASCKCYFFDNMGEFSDRRFGEASEPRFSDVLRRRFIRLARTRGRRKSTRPSQRLRLSEPGYVEEAEHLKISIDFLLELAEADSNCSNFSNWSHMAVDFILASLKKLISMGRNLEAVEESISFMITQLIKRMCTPFIGNEVKQLETSAGLYVQHLIRKLGSDPYIGQRAIFSVSQRLSILAENLLVMDPFDESFPEMDECMFILIQLTEFLICDYLLPWAESEAFETVVFEEWIASVIHARKAVAALDQRNGLYLLYMDRVTGELAKRVGQVTSFREVEPSILDKILAYPE

SEQ ID NO: 199 - DNA, 1197 bp, Glycine max
atggcagagaacgaagatgcaagaaggagcgatgaatcgatgaagcttgcggtggcgatatcgcttctgagatcaaaggttttgaaaacgaaaggttcgaaacgcttccttcgttttcttctcaatctaatgctttctactcttcgctatcgtttcaccttcggattctcaggccaaggaaagaaagcaagagatcctgaggcttcgagaagatctcaaagacgctcaaggtttcgacctcattcctctctcctattaactcatgcttcgcactgcgatctcttccctgagagtgctgcttgcaagtgttatttcttcgacaatttcggagaattaagccctatgcatcatggaactggttttgacagcagattcagcgacgtccttcgacgcagatttctaagacaagtgcgatttaaggaaaggaggaaaagacattttagttataaacgaatgagtattagtgtactgtattccatactttgtgataagaactgtggcttaattgaggaggatgacacagagcagcttagggcctccgttgattttatcttggaaatctgtgactctgtatcaccggtggatgattccaagtttgcaaatctggcacatcaagctgtagactttatattggttacattgaagaattttttatctatgggaaggaacctggaacttgttgaaggaattatcaacagcctagttacacgtttgattaggcagatgtgctcgtccttgtcagaaactgggtctcaacacacgggaaccaatgctcaattttgtattcaacatttgatccgtaaacttggaagtgagccttatattggtcagcgggcaatactttcagtttgtcaaagaattttggtactagctgaacgtttgcttttctctgatccttttgatgatggctttcctaacatgcatgaaagtatgttcataatgatccagcttatcgagttcttggtgacggattacttatcagagtggtcaaaagctgaagattttgacaacttgctccttgaagattgggtgacatcaattgtccagttaagaaaagcattagaacttctggaaagcagaaatggactttatgctctctatatggaccgagtcacaggtgaattggcaaaacaacttggcggtgtctcatcgtttctgaagcttaaaccggatattattaattgtctctttcgctaa

SEQ ID NO: 200 - protein, 398 aa, Glycine max
MAENEDARRSDESMKLAVAISLLRSKVLKTKGSKRFLRFLLNLMLSTLRYRFTFGFSGQGKKARDPEASRRSQRRSRFRPHSSLLLTHASHCDLFPESAACKCYFFDNFGELSPMHHGTGFDSRFSDVLRRRFLRQVRFKERRKRHFSYKRMSISVLYSILCDKNCGLIEEDDTEQLRASVDFILEICDSVSPVDDSKFANLAHQAVDFILVTLKNFLSMGRNLELVEGIINSLVTRLIRQMCSSLSETGSQHTGTNAQFCIQHLIRKLGSEPYIGQRAILSVCQRILVLAERLLFSDPFDDGFPNMHESMFIMIQLIEFLVTDYLSEWSKAEDFDNLLLEDWVTSIVQLRKALELLESRNGLYALYMDRVTGELAKQLGGVSSFLKLKPDIINCLFR

SEQ ID NO: 201 - DNA, 1128 bp, Glycine max
atggcagagaacgaagatgcaagaaggagcgatgaatcgctgaagcttgcgttggcgatatcgcttctgcgatcaaaggttttgaaaagcgtaaaggacgaaaggttccaaacgcttccttcgttttcttctcaatctaatgcctatgccttcgactcttcgctattaaagcaagagatcctgaggctcagagaagatctcaaagacgctcaagatgcttcgcactgcgatctcttccctgagagtgctgcttgtaagtgttatttcttcgacaatttcggagaattaagccctaagcatcatggaactgcctttgacaacagatttagcgatgtccttcgacgcagatttctaagacaagtgcgatttaaggaaaggaggagaagggtaggttcttcttcttcttcaagtcagcagcggaattctttaggtttaattgaggaggatgaaacagagcagcttagggcctccgttgattttctcgtggaaatctgtgactctgtatcatcggtggatgattccaagtttgcaaatctggcacatcaagctgtggactttatattggttacattgaagaatcttttatctatgggaaggaacctggaacttgttgaaggaattatcaacagcctagttacacgtttgatcaggcagatgtgctcgtccttgtcagaaaatgggtctcaacacacgggaaccaatgctcaattttgtattcaacatttgatccgtaaacttggaagtaagccttatattggtcagcgggcaattcttgcagtttgtcaaagaattttggtactagctgagcgtttgcttttctctgatccttttgatgatggctttcctcacatgcatgaaagtatgttcataatgatccagcttatcgagttcttggtgacggattacttattagagtggtcaaaagctgaagattttgacaacatgctccttgaagattgggtgacatcaattgtccaggcaagaaaagcattagaacttctggaaagcagaaatggactatatgcgctttatatggaccgagtcacaggtgaattggcaaaacaacttggcggtgtctcatcgtttctgaagcttaaaccggatatcattaattgcctctttcgctaa

SEQ ID NO: 202 - protein, 375 aa, Glycine max
MAENEDARRSDESLKLALAISLLRSKVLKSVKDERFQTLPSFSSQSNAYAFDSSLLKQEILRLREDLKDAQDASHCDLFPESAACKCYFFDNFGELSPKHHGTAFDNRFSDVLRRRFLRQVRFKERRRRVGSSSSSSQQRNSLGLIEEDETEQLRASVDFLVEICDSVSSVDDSKFANLAHQAVDFILVTLKNLLSMGRNLELVEGIINSLVTRLIRQMCSSLSENGSQHTGTNAQFCIQHLIRKLGSKPYIGQRAILAVCQRILVLAERLLFSDPFDDGFPHMHESMFIMIQLIEFLVTDYLLEWSKAEDFDNMLLEDWVTSIVQARKALELLESRNGLYALYMDRVTGELAKQLGGVSSFLKLKPDIINCLFR

SEQ ID NO: 203 - DNA, 1398 bp, Medicago truncatula
atgacggaggttggaaatgccgcaacgagtgatgaatctatgaaacttgccgtagcgatttcacttctccgttctaagtttatcaaaaacactaaacactcctccaatgctatctctccttctcaatcggaaaatcttctccgttggaaacgaaaggctaaggaaaggaagcaagagattctacgcctcaaagaagatctgaaagaaactcaagatgcttcgcactgtgatctatttcctgagagtgcttcttgcaagtgctatttctttgataatttagggaaattaagtcctaagcatgatcgaaatgattcgaataacagattcaatgacgtgcttcgccgaagatttctaagacaagtgagatttaaggaaaggaggagaagaattggatcttcatcttcttcaactcagcaacggctttctttaggtttagttgaggaggatgaaacggagcagcttaaggcgtctgttgattttcttatggagctgtgtgagactgtatcacctgtggatgattcaaagtttgcaaacttggcacaccaatccgttgaatttatattgggttcattgaagaatcttctgtctagaggaaggaacctggaacttgttgaacgaactatcaacagcttagttacacgtttgactgtgaagatgtgctcatacttgtcagaaaatggatctcaagacagtggcaccaatgcacagttctgtattcagcatttggtccgtaaacttggaagtgcgccctatattggccaacgggttatactttcagtttgtcaaagaattttggtgttagcagaacgtttgcttttctctgatccttttgatgaaaaatttcctgacatgcacgaatgtatgttcatcatgatccagcttattgagtttttggtggcagattacttactagagtggtcaaaagctgaagattttgacaccatgctccttgaagattggatgacagcaattattcaggcaagaaaagcattagaacttctggaaagcagaaatggactattcgcgctttatatggaccgtgtcacaggtgaattggcaaagcatgtcggtggagtctcattgcttcagaagtggcggagccagactaaaaagtttgggatggccgagaccaaaattgatttttcgactctttcaatcttcttggaaaacgaattgatttttcgactcttcatgttgcaaagaaacaaattttatcaaaatgatactcataattatagtatgttgtatcttgtaacaacaaattcaaataaaatcagagaaccaacattgttacaaggactgaggtacaaattgatgattgaatacaaagacacagtaggtagaactagaagatactatatagtgacaggtcaatatctgaatgaagaagtaatttag

SEQ ID NO: 204 - protein, 465 aa, Medicago truncatula
MTEVGNAATSDESMKLAVAISLLRSKFIKNTKHSSNAISPSQSENLLRWKRKAKERKQEILRLKEDLKETQDASHCDLFPESASCKCYFFDNLGKLSPKHDRNDSNNRFNDVLRRRFLRQVRFKERRRRIGSSSSSTQQRLSLGLVEEDETEQLKASVDFLMELCETVSPVDDSKFANLAHQSVEFILGSLKNLLSRGRNLELVERTINSLVTRLTVKMCSYLSENGSQDSGTNAQFCIQHLVRKLGSAPYIGQRVILSVCQRILVLAERLLFSDPFDEKFPDMHECMFIMIQLIEFLVADYLLEWSKAEDFDTMLLEDWMTAIIQARKALELLESRNGLFALYMDRVTGELAKHVGGVSLLQKWRSQTKKFGMAETKIDFSTLSIFLENELIFRLFMLQRNKFYQNDTHNYSMLYLVTTNSNKIREPTLLQGLRYKLMIEYKDTVGRTRRYYIVTGQYLNEEVI

SEQ ID NO: 205 - DNA, 1107 bp, Oryza sativa
atggctcctcccgcctcccgcccgccgacgccgacgccgacgccgacggcgaatgcggcggcctcctcgtcgcggatagagtcgccgtcgctcagggcggccctcgccatggctctcatccactacaaccgcctcccctctcgagcagcagcagccgctgccccctctccccaggctctcctcaactggaagcgcaaggccaaggaccggaagcgcgagatcctccgcctccgcgaggagctcaagctcctccaagacggggcgcgcggggaggagatggagccgccggtcgcgtcgtgccgatgccacttcttcgacgggtgcggggaccttccaccgccgacggacggcgatgctggggagcactgggtcgacgacgtgctgcggaggagattcgtcagattggaatataacactgaggatgaggtacaacagcttagcttgtcgattgatttcctggtggagttatcagatggcttgtttgccaaaagagaagctggctcctcatttactacattttctcaccaggcagtagacttcattctggcttcactgaagaacattctctcgtcagaaagggaaaaggagataatcgaggagataatcaatggtttggttgcacgtttgatgaaaaggatgtgcaccactcctgaaaatgctggatcagttgactgttcagatgcccaattctccctgcagcacttattccgtaagttaggaaatgaggagtttgttggtcagaggataatccttgcaatttctcaaaagatctcaaatgtatcagaaaaattacttctggcagatccatttgatgatggtttccctgaaatgcatagcaatatgtttattatgatacaattaatcgagttcctaatatctgacagcttcaacaattggctatgccgtgatcattttgacagaaaactttttgaagaatgggtcagatctattctcaaggcacgaaaggacttggaagtcctagatgggagaaacggactgtatgtggtatacattgagcgagtgattggaagattggcaagggaggtagctcctgctgctcatcaggggaagctggacctagaagtcctctccaaactcctttactga

SEQ ID NO: 206 - protein, 368 aa, Oryza sativa
MAPPASRPPTPTPTPTANAAASSSRIESPSLRAALAMALIHYNRLPSRAAAAAAPSPQALLNWKRKAKDRKREILRLREELKLLQDGARGEEMEPPVASCRCHFFDGCGDLPPPTDGDAGEHWVDDVLRRRFVRLEYNTEDEVQQLSLSIDFLVELSDGLFAKREAGSSFTTFSHQAVDFILASLKNILSSEREKEIIEEIINGLVARLMKRMCTTPENAGSVDCSDAQFSLQHLFRKLGNEEFVGQRIILAISQKISNVSEKLLLADPFDDGFPEMHSNMFIMIQLIEFLISDSFNNWLCRDHFDRKLFEEWVRSILKARKDLEVLDGRNGLYVVYIERVIGRLAREVAPAAHQGKLDLEVLSKLLY

SEQ ID NO: 207 - DNA, 1017 bp, Setaria italica
atgggtcctcctgccccctcccgcccgccaacgccgacggcttcagcggcgacggccacctcttcgtcgcggatagactcgccgtctctgaaggccgcgctcgctatggctctcatccactacaaccgcctccccggcaaagccgccgccaccgcctccgccgccgcgggcacatccacatcatccgcgcctttcctccactggaagcgcaaggccaaggaccgaaagcgcgaaatcctccgcctccgcgaggagctcaagctcctccaagatggggcgcgcggggaggagatggaaccgccggtcgcctcgtgccggtgccatttcttcgacgggtgcggggacctgctgccacagccgggcggcggcggtggggagcactgggtcgacgaggtgctgaggaggaggttcctcagactggtgcggtggaaggagaagagacgccgagtagatcgaccacttccaaggagtagtttgattgatctcaacagtgaggatgagatgcagcagcttagcatgtcgactgatttcctggtggagctatcagacggcctttttgccaaaagagaagctgccccctcatttgttacattttctcaccaagcagtggatttcattctggcttcactgaagaacattctatcatcagaaagggagaaggagctagttggggagataatcgatggtttagtgtctcgtttgatgaaaaggatgtgcactgttcctgaaaatgctggtacttcagattcaggatcagttgactgctcagatgcccagttctctgtgcagcacttgttccgtaagttagggaatgaggagtttattggtcagcggataatccttgcagtttctcaaaagatctcgaatgcatcagaaaggttacttctggttgatccttttgatgatgctttccctgatatccatggcaatatattcatcatgattcagttaatcgagttcctaataactgattacatgaaagattggctttgctgcgagcattttgacaaaagttag

SEQ ID NO: 208 - protein, 338 aa, Setaria italica
MGPPAPSRPPTPTASAATATSSSRIDSPSLKAALAMALIHYNRLPGKAAATASAAAGTSTSSAPFLHWKRKAKDRKREILRLREELKLLQDGARGEEMEPPVASCRCHFFDGCGDLLPQPGGGGGEHWVDEVLRRRFLRLVRWKEKRRRVDRPLPRSSLIDLNSEDEMQQLSMSTDFLVELSDGLFAKREAAPSFVTFSHQAVDFILASLKNILSSEREKELVGEIIDGLVSRLMKRMCTVPENAGTSDSGSVDCSDAQFSVQHLFRKLGNEEFIGQRIILAVSQKISNASERLLLVDPFDDAFPDIHGNIFIMIQLIEFLITDYMKDWLCCEHFDKS

SEQ ID NO: 209 - DNA, 1023 bp, Sorghum bicolor
atggctcctcctcctcccaactcccgcctgccaacgccgacggcgtcagcggctacgggcacctcctcgtcgcgaatagactcgccgtcgctaaaggccgcgctcgcaatggctctcatccactacaaccgcctgcccggcaaagccaacgccaccgtcaccgccaccgccgcctccgcaggcacatcgcccccgcctcttatccactggaagcgcaaggccaaggaccggaagcgcgaaatcctccgcctccgcgaagagctcaagctcctccaagatggggcgcgcggggaggagatggagcccccggttgcgtcgtgccggtgccacttcttcgacgggtgcggggaccttccaccgcagcagggtggcggtggtggggagcattgggttgacgaggtgctgaggaggaggtttctcagactcgtgcggtggaaggagaaacgacggcgagtggatcggcctcttccaagttgtagtttgattgatttcaacagtgaggatgagatgcagcagctcagcatgtcgattgatttcctggtggagctatcagacggcatttttgccaaaagagaagctggcccctcatttgctacattttctcaccaagcagtagatttcattttggctacactgaagaacattctttcatcagaaagggaaaaggagctagttggggagataatcgatggtttagtgactcgtttgatgaaaaggatgtgcaccgttcttgaaaatcctggtacttcagattcaggatcaactggctgctcagatgcccagttctctgtgcagcatttattccgtaagttgggaaatgatgaattcattggtcagcgggtaatccttgcagtttctcaaaagatctcaaatgtatctgaaagattgctcttgatcgatccgtttgatgatgctttccctgatatgcatgacaatatattcatcatgattcagttactcgagttcctcatatctgattacatgaaagtttggctatgctgcgagcatattgacaaaagttag

SEQ ID NO: 210 - protein, 340 aa, Sorghum bicolor
MAPPPPNSRLPTPTASAATGTSSSRIDSPSLKAALAMALIHYNRLPGKANATVTATAASAGTSPPPLIHWKRKAKDRKREILRLREELKLLQDGARGEEMEPPVASCRCHFFDGCGDLPPQQGGGGGEHWVDEVLRRRFLRLVRWKEKRRRVDRPLPSCSLIDFNSEDEMQQLSMSIDFLVELSDGIFAKREAGPSFATFSHQAVDFILATLKNILSSEREKELVGEIIDGLVTRLMKRMCTVLENPGTSDSGSTGCSDAQFSVQHLFRKLGNDEFIGQRVILAVSQKISNVSERLLLIDPFDDAFPDMHDNIFIMIQLLEFLISDYMKVWLCCEHIDKS

SEQ ID NO: 211 - DNA, 1104 bp, Vitis vinifera
atgtcgacgtcgaacaccgactctcatcaatccttgaaattggccgttgccatggctctcctccgttctaagctcctccacaacaccaaccctcctcctccacattccgacgctcttcgttggaagcgaaaggccaaggagagaaaacaagagcttcttaggctcaaggaagatctcagggaagccgaagatggtttacgacatgatctcttcccgccaagcgcttcttgcaagtgccatttcttcgatgatttggggaaattgagccccaatcagttcgaacgtggctctaatcgcaacttcaatgatgttcttcgccggagatttctcagacaagtgcggttgaaggaacgaaggagaaaaagaacggatgattcaatcaaacataaccattattcagatatagtctgcgaggatgaaacagaacaacttagggcctcaattgattttctggtggagctttgcgacactgcttctcctgtcagtgtggagaacagtaacttcacaaactggtcacaccaagctgttgactttattttagcttcattgaagaatctgctatcagtgagaaagaatgtggaatacattaaaggaattatcaacagcttaattaagcatttggtcagaaggttgtgtacgcccttaaaaggagatgagttacatcatttggatgctgatcaccagttctatgtccagcacttgatccgcaagcttggaagtgatccctttgttggacaccgggcaatactctcagtttctcaaagaatttctttgatagctgaaagtttgcttttcttggatccttttgatgatgcttttccaaatttgcatggttgtatgtttgtgctgatccagcttattgaatttctgatatcagactacttcttggtttggtcaagagatgaaggttttgacaacatgctgtttgtcgagtgggtgacatcaattcttcatgcacggaaagcattagaactcttggaaagcaggaatgggctttatgttctatacatggatagggtgactggggagttggctaaacatgtgggtcaggtttcactactccaggagctcaaccctgatattattaatatcctgttccattga

SEQ ID NO: 212 - protein, 367 aa, Vitis vinifera
MSTSNTDSHQSLKLAVAMALLRSKLLHNTNPPPPHSDALRWKRKAKERKQELLRLKEDLREAEDGLRHDLFPPSASCKCHFFDDLGKLSPNQFERGSNRNFNDVLRRRFLRQVRLKERRRKRTDDSIKHNHYSDIVCEDETEQLRASIDFLVELCDTASPVSVENSNFTNWSHQAVDFILASLKNLLSVRKNVEYIKGIINSLIKHLVRRLCTPLKGDELHHLDADHQFYVQHLIRKLGSDPFVGHRAILSVSQRISLIAESLLFLDPFDDAFPNLHGCMFVLIQLIEFLISDYFLVWSRDEGFDNMLFVEWVTSILHARKALELLESRNGLYVLYMDRVTGELAKHVGQVSLLQELNPDIINILFH

SEQ ID NO: 213 - DNA, 1656 bp, Zea mays
ttaaattcgttgatcacggatcacggtccacatattcttgggtgggcctctcctctcgtttgcctgcgccgccgcgatcgccaatcggcatggctcttcccaaaccccgcccgccaacgccgacggcgtcagcggccacgggcacctcctcgtcgcgaatagactcgccatcgctaaaggccgcgctcgcaatggctctcatccactacaaccgcctccctggcaaagccaacgccaccgcgggcacatcacccccgtctctcctccactggaagcgcaaggccaaggaccggaagcgcgaaatcctccgcctccgcgaggagctcaaggtcctccaagatggggtgcgcggggaggagatggagcccccggttgcgtcgtgccggtgccacttcttcgacgggtgccgggaccttcgaccgcagcagggtggcggtggtggggagcactgggttgacgaggtgctgaggaggaggtttctcagactggtgcggtggaaggagaagcgacggcgagtggatcgatctcttccaagttctagtttgatcgatttcaacagtgaggatgagatgcagcagctcagcatgtcgactgatttcctggtggagctatcagacggcatttttgccaaaagtgaagctggccactcatttgctacattttctcaccaagcagtagatttcattttggctacactgaagaacattctttcatcggaaagggaaaaagacttagttggggagataatcgatagtttagtgactcgtttgatgaaaaggatgtgcactgttcctgaaaagcttgtcacatcagattcaggatcaactggctgctcagatgcccagttctcagtgcagcacttattccgtaagttgggaaatgatgaattcattggtcagcgggtaatccttgtagtttctcaaaagatatccaacgtatctgaaagattgttcttggctgatccgtttgctgatgctttccctgatatgcatgacaatatattcatcatgattcagttacttgagttcctcatatctgattacatgaaagtttggctatgctgtgagcatattaacaaaagactttttgaagaatgtaccagatctattctcaaggcacgcaatgatttgcaaatcctggaaaacatgaatgggctctatgtggtgtacattgagcgtgtggtcggaaggttggcaagggatgtggctcctgctgcacatcaggggaagctggacctagaagttttctccaaactgctgtgctgagagtgccttgcatatgacattccaagcctgacccggcctgttatatgcttaggttgattcaaaaccacgacaccattggtccacttagactatgcatagttacatttctgtttgaaagacaaactttagaatttggtagtggatctacttgtatggcctgttgtttcatgtcaccattgatagttgattagtttcattttgctgacttaacccctatacactgtgagttgctgtagacatgctttgttactctgcaaatttaggttgcatccgtgaataatagtaacttctgcgcgccctgcgcgcacaaaaaacgttacacaatatgtagtgtaaatgacatatttatacttagttatatatgctaatgcggtgaatttggcttggactt

SEQ ID NO: 214 - protein, 391 aa, Zea mays
MALPKPRPPTPTASAATGTSSSRIDSPSLKAALAMALIHYNRLPGKANATAGTSPPSLLHWKRKAKDRKREILRLREELKVLQDGVRGEEMEPPVASCRCHFFDGCRDLRPQQGGGGGEHWVDEVLRRRFLRLVRWKEKRRRVDRSLPSSSLIDFNSEDEMQQLSMSTDFLVELSDGIFAKSEAGHSFATFSHQAVDFILATLKNILSSEREKDLVGEIIDSLVTRLMKRMCTVPEKLVTSDSGSTGCSDAQFSVQHLFRKLGNDEFIGQRVILVVSQKISNVSERLFLADPFADAFPDMHDNIFIMIQLLEFLISDYMKVWLCCEHINKRLFEECTRSILKARNDLQILENMNGLYVVYIERVVGRLARDVAPAAHQGKLDLEVFSKLLC

SEQ ID NO: 215 - DNA, 672 bp, Brassica napus
gactctccactctagtctcagatatttttttctctctacttcaaaaattccgtttagagacttctctccctcttctctaatttgaaatatcgttgaagaagagctgcgatctacgatgaagatgaacaaagcctttgatctgaaatcgatttcggtgtttcctcctaatttaagaaggagatcgagcgttggaccctccgagccacaagcatcgcagcagtccttatcgcagggaccttcctctcagcgaggctgtttttctcagctgactcagagctctgtcgatcagctctatgatcagagatttacttgtcaggaacgagatctctctttgaagaagaatagtttcttggccccggttaatcataaacgagacgatattcagatgcgttcatctcgaccttccagcggaagatggagttctgtttcccttgcagaatctaaatctcagattagtgaagaacgctttgggatgatggaaacttcgttgagcaagtttggaatgatgctggattccattcagactgacatcattcaagccaaccgaggaaccaagcaagtatttctcgaaagttagttctatgtttgatctcattttcagtattttatcaacctgcacttcacatgaataacgtctcaatagatagctggcttttatagtttctatgtgtg

SEQ ID NO: 216 - DNA, 1200 bp, Brassica rapa
atgaagatgaacaaagcctttgatctgaaatcgatttcggtgtttcctcctaatttaagaaggagatcgagcgttggaccctccgaaccgcaagcatcgcagcagtccttatcgcagggaccttcctctcagcgaggctgtttttctcagatgactcagagctctgtcgatcagagatttacttgtcaggaacgagatctctctttgaagaagactagtttcttggccccggttaatcataaacgagacgatactcagatgctttcatctcgaccttccagcggaagatggagttctgtttcctttgcagaatctaaatctcagattagtgaagaacgctttgggatgatggaaacttcgttgagcaagtttggaatgatgctggattcctttcagactgacatcattcaagccaaccgaggaaccaagcaagtatttctcgaaactgaacgcctacaccaaaagttgcttctccaagacacttcccttcagcagctaataaaggaacaaacagatgttaaagccagtcttgatggagctgttaaatctgttctggaggaactaaccaaatttcctaatcaagagaagcttcagaaaatagctctgatgttaacagctatcccggagcaagtagaaacctctctgcagaaaatacaaagcgaaatctgccacaagcttaccggagatattcaggttttggctagcttgaagatgactgagccagtaatagctcaggaggttccaacagcaccacaagtgaagaagtctaaggaaaacttgcatgagcagcgtggtccagcagccaagctacagagcagtgccttttgtgatgctatactgaaaacgaaacaacctcggcttcatagaaatccagataagacatcagcgaggaatgtaaaaacatttttatccccaaagacacaagtgggatgttggaagacggtgaaaccagcacaaagaacgtcaaagaataacacagcaagaaagcaagtgaaacctgtaggcactcgtacgcagtttgaggaatgcagcattgtcatagactcagatgaagatatagatgaaggcttttcatgcttgctgaaagggaacaccaaaggagctagcttcgaatgggatgcaaagaaggaaacggaaaggctgctgaagacagcgaggaggacaaggaggaagttcggtaaccccataataataaactga

SEQ ID NO: 217 - protein, 399 aa, Brassica rapa
MKMNKAFDLKSISVFPPNLRRRSSVGPSEPQASQQSLSQGPSSQRGCFSQMTQSSVDQRFTCQERDLSLKKTSFLAPVNHKRDDTQMLSSRPSSGRWSSVSFAESKSQISEERFGMMETSLSKFGMMLDSFQTDIIQANRGTKQVFLETERLHQKLLLQDTSLQQLIKEQTDVKASLDGAVKSVLEELTKFPNQEKLQKIALMLTAIPEQVETSLQKIQSEICHKLTGDIQVLASLKMTEPVIAQEVPTAPQVKKSKENLHEQRGPAAKLQSSAFCDAILKTKQPRLHRNPDKTSARNVKTFLSPKTQVGCWKTVKPAQRTSKNNTARKQVKPVGTRTQFEECSIVIDSDEDIDEGFSCLLKGNTKGASFEWDAKKETERLLKTARRTRRKFGNPIIIN

SEQ ID NO: 218 - DNA, 1854 bp, Brassica rapa
atgaatatcaacaaagcctgcgatctgaaatcaatatccgtgtttcctcctaatctaaggggatcgagtattggaccgttggaaccacaggcatcgcgatcacagcagtcgcagcagcttcgatctcagcagtcacagcagtcgttctcgcagggaccttcgtcttactctcagcgtggttgtttttctcagaggactcagggctcggttgatgaactcgtgataagcgatcagagatttagttcccaagaacgagatcactctttgaagaaggttaattgcttgcccccaattagtcatagaagagatgatagtcagcttgttgcgtatagatcttctagcggtcttcagagaagatggagttctgactcagtcggagagtctaaatctcaactcagtgaagaatttgagcaacggtttagggtgatggaaacttcactgagcaagtttgggatgatgttggattcaattcagagtgacatcatgcaagccaacagaggaactaaagaagtattacttataactgaacgcatacagcaaaagttgattctccaagacacttcacttcagcagctgataaaggaacaagcaaattttaaagctagtcttgatggaggtgttaaatcgatattggaggaactaagcaaagatttcagtgaagagaagctacaaagtataaccctgatgctaaaggctatcccagaacaagtagaatccgctctgcagaaaatgcaaagggaaatctaccacacgttcaccagagagtctcaggctttgtctagcttggagatggctgaggtaatatttcaggctccagcagcaccacaagtgaaggctaaggaaaacctgcctgaacatcggggtccatcagcgaaggttttgcctatcatgaagaagcctgagccaatagatcgtcttccaagagcaccacaactgaagccaaacatttcagcaattaatatgacttttgttcaacagcagtcaaaggaaaactttcctgagcagcgtggagcagaagccaagagaaatgctatttctaatgctacaccgaaaaggaaaaaaccatcatctagaaccgtaaagacatctttatccccaaagatacaagttggaggctggaagacagtgaaaccagaacaaaacacattcaagaagagcgcagcaagaaagcaagtaaaaccagaagacactcgtacacagtttcaacaaggttgtattgtgatagactcagatgaagatatagacggaggcttttcatgtatgctcaacgggaacgccaaaggtatgaacaaagaatctctaaaacttgatttctctggaagcaatggagaacttgttgtgtttgtaagatctgagatgggcgagccgctaggactgctccaggtgactgttattcgaggaaagaaactggttatcagagacttcaagtcaagtgatccttacgtgattgtcaaactgggaactgagtcagccaagaccaaagtgatcaacaactgcttgaatcctgtgtgggatgaggaactgagctttacactcaaagaccctgcagcagttctctcattggaagtgtttgataaagataggttcaaggcagatgacaagatgggtcatgccactctcagccttcaaccgctcatctcagtagccaggctaaggcatatagtgcgtgtctcctctggcgagacaactcttaggaaagtgttacctgattctgacaactgtgtatctcgggagagcacaatcagctgcatagacggagaggtggtgcagagcgtgtggctgaagctgtgcgctgttgaatcgggtgagattgagttgaagatcaagttgatcgatcgtcctggaacaaagtag

SEQ ID NO: 219 - protein, 617 aa, Brassica rapa
MNINKACDLKSISVFPPNLRGSSIGPLEPQASRSQQSQQLRSQQSQQSFSQGPSSYSQRGCFSQRTQGSVDELVISDQRFSSQERDHSLKKVNCLPPISHRRDDSQLVAYRSSSGLQRRWSSDSVGESKSQLSEEFEQRFRVMETSLSKFGMMLDSIQSDIMQANRGTKEVLLITERIQQKLILQDTSLQQLIKEQANFKASLDGGVKSILEELSKDFSEEKLQSITLMLKAIPEQVESALQKMQREIYHTFTRESQALSSLEMAEVIFQAPAAPQVKAKENLPEHRGPSAKVLPIMKKPEPIDRLPRAPQLKPNISAINMTFVQQQSKENFPEQRGAEAKRNAISNATPKRKKPSSRTVKTSLSPKIQVGGWKTVKPEQNTFKKSAARKQVKPEDTRTQFQQGCIVIDSDEDIDGGFSCMLNGNAKGMNKESLKLDFSGSNGELVVFVRSEMGEPLGLLQVTVIRGKKLVIRDFKSSDPYVIVKLGTESAKTKVINNCLNPVWDEELSFTLKDPAAVLSLEVFDKDRFKADDKMGHATLSLQPLISVARLRHIVRVSSGETTLRKVLPDSDNCVSRESTISCIDGEVVQSVWLKLCAVESGEIELKIKLIDRPGTK

SEQ ID NO: 220 - DNA, 615 bp, Glycine max
agagttggttctcaagaacatgaaaactctttgaggaggatgtctagcttctcccgacctacatattcacgggaagagagtcaagcacctaactcaagatcttcgtccaatctaatgctcaaatggcattctgctgatcataaaagtcagttaagtgaaggacttgaacaccgaattggcataatggaaacttcattgggcagattcacaatgatcttggattctgttcaaagtgatgtaatgcaagtaaacaaaggaacaaaggaaattactttggaggtggaatgcataaggcagaagttgattgctcaggataactcacttcagttaatgactaaaggacaagaagaaattaaagcaatcattgaagggagcctgaaatctttagctgaacaaatgagccatgtttcaaagaaagagaagttacgggaagtatatttggcggtttctgcgttgcctcagctaattgaagcctctctgcaaaacgtacaaaatgatctccgtaacatcaccaaggaaatgcaggcacttacccagatgactcgtcaaccaaaaggatctggcgccgaccactttgtcttcaaaggtgctttatctctattaatgaaccattaa

SEQ ID NO: 221 - protein, 204 aa, Glycine max
RVGSQEHENSLRRMSSFSRPTYSREESQAPNSRSSSNLMLKWHSADHKSQLSEGLEHRIGIMETSLGRFTMILDSVQSDVMQVNKGTKEITLEVECIRQKLIAQDNSLQLMTKGQEEIKAIIEGSLKSLAEQMSHVSKKEKLREVYLAVSALPQLIEASLQNVQNDLRNITKEMQALTQMTRQPKGSGADHFVFKGALSLLMNH

SEQ ID NO: 222 - DNA, 529 bp, Glycine max
agagttggttctcaagaacatgagaactctttgaggaggatttctagcttgtcccgacctacatattcacgggaagagagtcaagcacctaactcaagatcttcatccaatctaatgctcaaatggaattctgcagatcataaaagtcagttaagtgaaggacttgaacaccgaattggcataatggaaacttcattgagcaggttcacaatgatcttggattctgttcaaagtgacgtaatgcaagtaaacaaaggaacaaaggaaattattttggaggtggaatgcataaggcagaagttgattgctcaggataactcacttcagttaatgactaaaggacaagaagaaattaaagcaatcattgaaaggagcttgaaatctttagctgaacaaatgagccatgtttcaaagaaagagaagttacaggatgtatatttggcagtttctgcgttacctcagctaattgaagcctctctgcaaaatgtacaaaatgatctccgtaacatcaccaaggaaatgcaggcac

SEQ ID NO: 223 - protein, 176 aa, Glycine max
RVGSQEHENSLRRISSLSRPTYSREESQAPNSRSSSNLMLKWNSADHKSQLSEGLEHRIGIMETSLSRFTMILDSVQSDVMQVNKGTKEIILEVECIRQKLIAQDNSLQLMTKGQEEIKAIIERSLKSLAEQMSHVSKKEKLQDVYLAVSALPQLIEASLQNVQNDLRNITKEMQA

SEQ ID NO: 224 - DNA, 1359 bp, Medicago truncatula
atgaagatcaacaaagcctccgatctctcctccatctccgtcttccctcctcctcacgtttattccaggaagatgaacaatgcatccaatggatttcaagcctcgcaacatcgatcgcaaccgtcgcatcgagatatagagaggcagaacaatgtatcgaatggattgcatgcgatgtcgcaacatcgatcacaaccgtctcagcagtcattttctcagggactttcatctcagcaaggaattttgtctcatttctctcagagttctcttgatgaagctatcacaacaaatgaccagagagctgcttctcaagaacttgagaactcttcaaggaggttttctagtttgccccgccttacttattcaaaggacgagagtcaaccccacaactcaagatcttcatcaaatctcctggtcaaatggaactctgcagataataaaaatcagttaagtgaaggactcgaaaacagaattggcataatggaaacctcattgagcaggtttgcaatgatcatggattctgttcaaagtgacgtaatgcaagtaaacaaaggaacaaaggaaatgcacttggagatggagtgcataagacaaaagttgattgctcaggataacacacttcagttaatgatgaaaggacaagaagaaattaaagcaagcatcaatgggagtttgaaatctttatctgaacaaatgagccgtgttacagacatagagaagttacaggaagaaatctcttgcagtttaaaacattctaaccaaaaggatctggcacagcctattctatctccaaagtgtgttagcaaacaagttatcacaccgaaaatgcgtcagactccagccgtctggtttatggccaagggtcacatgtatttttctcttgaattcagtgaagcgaagaagaacactccagttattgtagcttcagaagcagacacaggaggctggaggccagtaaaaagagaaagagtcactttttcagatagaatatctgagaaggttcaaaagcgaattccaccaaaagtggagaagggtataaggggaggaagagactatgcaattgtcattgaatctgacgaggagtctgattgctttgaagtaaaatcaggaaagtgggaagggaagaaaaaagaaaaaattacaaatgaggcaagtaacatcagccaaatggagggagctaagttggttacaacagatggacatgcagcggttaggaggagtgcaaggaagagactccctaaccaaatgatggatgattttgtgtgcaaaggacttgtttggaaatttgaccaaggaagaagaggaagaaaccgagagaattttgaggaatgcaaggaggcacaagaggaagcaacgtaa

SEQ ID NO: 225 - protein, 452 aa, Medicago truncatula
MKINKASDLSSISVFPPPHVYSRKMNNASNGFQASQHRSQPSHRDIERQNNVSNGLHAMSQHRSQPSQQSFSQGLSSQQGILSHFSQSSLDEAITTNDQRAASQELENSSRRFSSLPRLTYSKDESQPHNSRSSSNLLVKWNSADNKNQLSEGLENRIGIMETSLSRFAMIMDSVQSDVMQVNKGTKEMHLEMECIRQKLIAQDNTLQLMMKGQEEIKASINGSLKSLSEQMSRVTDIEKLQEEISCSLKHSNQKDLAQPILSPKCVSKQVITPKMRQTPAVWFMAKGHMYFSLEFSEAKKNTPVIVASEADTGGWRPVKRERVTFSDRISEKVQKRIPPKVEKGIRGGRDYAIVIESDEESDCFEVKSGKWEGKKKEKITNEASNISQMEGAKLVTTDGHAAVRRSARKRLPNQMMDDFVCKGLVWKFDQGRRGRNRENFEECKEAQEEAT

SEQ ID NO: 226 - DNA, 1879 bp, Oryza sativa
gcaggaagaaattcaaatttgcgaatattctctctctctccccggcgaaggcgacggcgaaggagaaggctacggcgatcggcggcgatcggcggcatgaagcttaagatgaacaaggcctgcgacatcgcctccatctccgtcctccctccccggaggaccggagggagcagcggcgcgtcggcttccggttccgtggcggtggcggtggcgtctcagccgcggtcgcagccgctctcgcagtcgcagcagtccttctcgcagggcgcctccgcctcgctcttgcactcgcagtcgcagttctcgcaggtctccctcgacgacaacctcctcaccctcctcccttcccccacccgcgatcagagatttggcttgcatgatgactcatccaagaggatgtcctctttaccagccagttcagcttcttgcgcgcgagaagagtctcagctgcaactggcaaaattaccaagcaacccagtgcaccgctggaacccctccattgcagatactagatcaggtcaggttactaatgaggatgttgagcgcaaatttcagcatctggcaagctcagtacataagatggggatggtggtagactcagtccaaagtgacgtaatgcagttaaacagagccatgaaggaggcatcattagattctggtagcatacggcaaaagattgctgtccttgaaagctcacttcagcaaattcttaagggacaagacgatctcaaagcactctttggaagcagcacaaaacacaatcctgatcagacaagtgttctgaattctctaggcagcaaattgaatgagatatcctcgacccttgcaaccttgcagacacaaatgcaagcaagacaactgcagggtgatcagacaactgttctgaattctaatgccagcaaatcgaatgagatatcctcgactcttgcaaccctgcagacacaaatgcaagcagatataagacaactgcggtgtgacgtcttcagagtttttacaaaagagatggagggggttgttagagctatcaggtctgtcaatagtaggcctgctgcaatgcaaatgatggcagaccagagttaccaagtaccagtttcaaatggatggacccagattaaccagacaccagtagcagctggaaggtctccaatgaaccgagcaccagtagcagctggaaggtcccggatgaaccaattacctgaaacaaaagtgctttctgcacatttggtttatcctgcaaaggtgacagatctgaagccaaaggtggagcagggaaaggtaaaagcagctccacaaaagccgtttgcttcgagctactacagggtggcacctaaacaggaagaggtagcgattagaaaggtcaatatacaagtgccagcaaagaaggcaccagtcagcataatcatcgagtcggatgatgacagtgaaggacgtgcgtcctgcgtgattttgaagacagaaacaggtagcaaggagtggaaagtgacaaagcaaggcaccgaagagggcctggagatcctgcggagggcgaggaagaggaggaggagagagatgcagtccatcgtgctcgcatcctagctaattaatggtaacgccgcatgcatcgtcatcatcatctcaagattgactgattgttttaacataaagccaaacaaaggaaagagataaagattacgacaagacgaaattaaaaggtaaatcaaccactaaactagagagctagaacctgctgtccagtgctgctgttgttattgttgcggttgttgttgggaggtcgagtggacaactaacttaccatgctgccgaatgctgtaccgcatcacaaacagacaccacttttcgcacatactgtagagcaaccagctgatgccattcctatata

SEQ ID NO: 227 - protein, 492 aa, Oryza sativa
MKLKMNKACDIASISVLPPRRTGGSSGASASGSVAVAVASQPRSQPLSQSQQSFSQGASASLLHSQSQFSQVSLDDNLLTLLPSPTRDQRFGLHDDSSKRMSSLPASSASCAREESQLQLAKLPSNPVHRWNPSIADTRSGQVTNEDVERKFQHLASSVHKMGMVVDSVQSDVMQLNRAMKEASLDSGSIRQKIAVLESSLQQILKGQDDLKALFGSSTKHNPDQTSVLNSLGSKLNEISSTLATLQTQMQARQLQGDQTTVLNSNASKSNEISSTLATLQTQMQADIRQLRCDVFRVFTKEMEGVVRAIRSVNSRPAAMQMMADQSYQVPVSNGWTQINQTPVAAGRSPMNRAPVAAGRSRMNQLPETKVLSAHLVYPAKVTDLKPKVEQGKVKAAPQKPFASSYYRVAPKQEEVAIRKVNIQVPAKKAPVSIIIESDDDSEGRASCVILKTETGSKEWKVTKQGTEEGLEILRRARKRRRREMQSIVLAS

SEQ ID NO: 228 - DNA, 1752 bp, Setaria italica
atgaagcttaagatcaataaggcgtgcgacctcggctccatctccgtcctccctccccgtaggaccggagggagcggcggcgccggcgtggtgggcgcgtcgggttcctccgccgcggccctggcggggtcgcagcagcagcagcagcagcgctcgcagccgctatcgcagcagtccttctcgcagggcgttgggggaagcggaggcgggtcgtcgctcctgcactcgcagtcgcagctctcgcagggatccctcgacgatagcctcctcagcctccacctcgcgtctcccacgcgcgatcagagatttgggttacatgatgactcatcaaagaagatgccttcgttgcctgtcaactcagcttcttgtgtgcgagaagaatctcagctgcaactggcaaaaatatcaagcaaccctgtccatcgatggaatccttctcctcctgacagtcaggttcctaatgaagatgttgagcgcaaatttcagcatctggcaagttcggtgcataagatggggatggtactcgattcggtgcaaaatgatgttatgcagttaaacagagccatgaaggaagcatcactagattctggaagcatacagcagaaggtggttgtcctagacaattcactgcagaaagttcttaagggacaagatgatctcaaagcactttttgagagcagcaccaaaagcattgctgatcagctgagtgttctgaactcccattcccgcaaactggatgagatatcctcgaccctttcagtctggccgaaacaaatagagatagatttaaggcaacttcaaagtgacatcttcagaatttttgcaaaagagatggaggggattgttagagctatcagatctctcaacagtaggcctgctgcaatccaaatgccaacagaccagagctgcatgaccaatggaaggccactgatgaaccaactaccactagtaaatgaaaggtcccaggtgaaccaaacaccagtagcaacccgggtgagccaaacaccagttgcaatcatggtgaaccaaacaccagtagcaagcttggtgagccaaacagcaggagcaaatggaagacacttggcgagccaaacaccagcagcaaatgggaaaactctgatgaaccaaacatcagtagctgatggaagatccctgatgagccaaacaacagcaccaaatggaagacctgtgatgagccagagaccagcagcaaatggaaggtcccagacgaaccaaatacatgtagcaagtggacagccctatacgaacaaaataccagcaccaaaacatgttcagaggctactgcagtggaatgtttgtttgtttgttttttatattagctatggatttttcagttttattattttcacatatgaatgcttccttattatcggcaggcatcctgcacctttggcttgccccgcaaaggttgcagatccgaagttgaaggtagaagagggaaagatgaaagcgcttccccaaaggttgaccggtggttctagaagcagggtggtacctaaacaggaagaggtgccaactacaaaggtcacccggagtgtggcaactaagaaggcaccgccggccttgataatcatcgactctgatgatgacagcgaaggtcgcgtctcctgcgtgatcctcaagtcctcagaatcaggtgacaaggagtgcgacctgatgaaggaagccgcggaagagagccagcagatcctgcggagggccaggaagcggcggagaagagagatgctgcag

SEQ ID NO: 229 - protein, 584 aa, Setaria italica
MKLKINKACDLGSISVLPPRRTGGSGGAGVVGASGSSAAALAGSQQQQQQRSQPLSQQSFSQGVGGSGGGSSLLHSQSQLSQGSLDDSLLSLHLASPTRDQRFGLHDDSSKKMPSLPVNSASCVREESQLQLAKISSNPVHRWNPSPPDSQVPNEDVERKFQHLASSVHKMGMVLDSVQNDVMQLNRAMKEASLDSGSIQQKVVVLDNSLQKVLKGQDDLKALFESSTKSIADQLSVLNSHSRKLDEISSTLSVWPKQIEIDLRQLQSDIFRIFAKEMEGIVRAIRSLNSRPAAIQMPTDQSCMTNGRPLMNQLPLVNERSQVNQTPVATRVSQTPVAIMVNQTPVASLVSQTAGANGRHLASQTPAANGKTLMNQTSVADGRSLMSQTTAPNGRPVMSQRPAANGRSQTNQIHVASGQPYTNKIPAPKHVQRLLQWNVCLFVFYISYGFFSFIIFTYECFLIIGRHPAPLACPAKVADPKLKVEEGKMKALPQRLTGGSRSRVVPKQEEVPTTKVTRSVATKKAPPALIIIDSDDDSEGRVSCVILKSSESGDKECDLMKEAAEESQQILRRARKRRRREMLQ

SEQ ID NO: 230 - DNA, 1794 bp, Sorghum bicolor
atgaagcttaagatcaacaaggcgtgcgacctcggctccatctccgtcctccctccccgtaggaccggagggagcggcggcgcaggcgaggcgggttcctccgccgcggccgtggcggcggggtcgcagcagcggtcgcagccgatgtcgcactcgcagcagtccttctcgcagggcgttatggggagcggcggcgcgtcgtcgctcctgcactcgcagtcgcagctctcgcaggcctccctcgacgagaatctcctcagcctccacctcgcctcgcccacgcgcgatcagagatttgggttgcatgacgactcatcaaagaagatgccatcattgcctgtcagctcggcgtcttgtgtgcgagaagaatctcagctgcaactggcaaaaacaccaagcaaccctgtccatcgatggaacccttctcttcctgatggcagtgttttaacaggtgtggttcctactgaggatgttgagcgcaaatttcagcatatggcaagttcggtgcataaggtagggatggtgctcgattcagtgcaaaacgacgttatgcagttaaacagagccatgaaggaagccgcactagattctggaagcatgcagcaaaagattgttgtcctagacacttcactgcagaagaatcttaagggacaagatgatctcaaagcacttgttgagagcaacaccaaaagcatctctgatcagctgactgttcttaactcccactccaacaaactggatgagatatcctcaaccctttcaatcttgccgaaacaaatagaaacagatttaaagcaacagcacagtgacatcttcagaatttttagaaaagacatggaggagattgttagagctgtcagatctctcaacagtaagattgatgcaatccaaatgccaacagaccagcgatgcacaatcaatggaaggcccctaatgaaccaactaccagtcgatagaaatgaaaggccccaggtgaaccaaacaccagaggtaacccggatgagccaaacaccagtagcaaccatggtgaaccaaacatcagtagcaagcttggtgaaccaaacaccagcagcaaatggaaggcacctggtgagccaaataccagcagcaaatgggaaaactttggtgagccaaacatcagtagcaaatggaagatccctgatgagccaagtaccaacagcaaatgggaaacctctgacgaaccaagcatcactagcaaatggaggatccctgatgagccaagtaccagcagcaaatgggaaacctctgacgaaccaaataccagcaccaaagggaagacccatgatgaggcagaaaacaggagaaagaggaaggccccagatgaaccaaatacctgtagcaagcttgcttactgatggcaggcatcctgcacctttggtcttccctgcaagtgcaaaggcagcagcagacccgaaggcgaaggtagacgacggaaaactgaaagtgcttccccaaaagctaactggttctagatccagggtgacacctaaacaggaagaggcggcgagtacaaagttcagccgggcagcagcaactgagaaggtggtgatattcatcgaggactctgacgatgacagcgacgtccgtgcttcttcctgcgtgatcctcaggtcatcgggatcaggtgcaggtgcaggtgcaggtgagagggagtgcgacctgatgaaggtgggcgcggaggagagccaggagatcatgcggagggccaggaagcggaggagaagagaaatgcaggccaccgttgccagcatgccgcctgaggttgggcactag

SEQ ID NO: 231 - protein, 597 aa, Sorghum bicolor
MKLKINKACDLGSISVLPPRRTGGSGGAGEAGSSAAAVAAGSQQRSQPMSHSQQSFSQGVMGSGGASSLLHSQSQLSQASLDENLLSLHLASPTRDQRFGLHDDSSKKMPSLPVSSASCVREESQLQLAKTPSNPVHRWNPSLPDGSVLTGVVPTEDVERKFQHMASSVHKVGMVLDSVQNDVMQLNRAMKEAALDSGSMQQKIVVLDTSLQKNLKGQDDLKALVESNTKSISDQLTVLNSHSNKLDEISSTLSILPKQIETDLKQQHSDIFRIFRKDMEEIVRAVRSLNSKIDAIQMPTDQRCTINGRPLMNQLPVDRNERPQVNQTPEVTRMSQTPVATMVNQTSVASLVNQTPAANGRHLVSQIPAANGKTLVSQTSVANGRSLMSQVPTANGKPLTNQASLANGGSLMSQVPAANGKPLTNQIPAPKGRPMMRQKTGERGRPQMNQIPVASLLTDGRHPAPLVFPASAKAAADPKAKVDDGKLKVLPQKLTGSRSRVTPKQEEAASTKFSRAAATEKVVIFIEDSDDDSDVRASSCVILRSSGSGAGAGAGERECDLMKVGAEESQEIMRRARKRRRREMQATVASMPPEVGH

SEQ ID NO: 232 - DNA, 768 bp, Vitis vinifera
atgaagatgaagataaacaaagcctgcgatctgagttcgatttcagttcttcctcctcataccaggagatcaagcaccgtgccaactggaccacaagtatcacagcagctccgatcacagcagcagtcacagcaatctttctcgcagtcgcagcatggaatgttttctcagttttcacagaactctcttgatgaaattgtggcaaatgatcagagatttggttctcaagaaagagagaattcgatgaaaaggatttcttgcttagccccagttagttttacaagggaagagagtcaaattccaatttcaaggtcttccaccagcctagctcgcaaatggagttctgcctccgctcctgattatagatgtcagattggtgaagacctggagcacaggattgggatgatggaaacttcattaaccaggtttggaatgatcttggattctattcagagtgatgtcatgcaagtgaataaaggaatgaaggaattcctaatggagatggaaggccttcggcagaagttaactgttcatgatagctcacttctgctaatgaacaagggacatgaagatatcaaagataggcttgatgctgccttgaagtctatttctgatcaaatgaacaaggatttatatcaagacaacttacagcagagcttcttaatgctttcagctttaccagagcagattgaaatgtgtttacaaaaattacaaaatgaactctgcaagaccatcaccaaagaaatgcaggcatgtataatactctaa

SEQ ID NO: 233 - protein, 255 aa, Vitis vinifera
MKMKINKACDLSSISVLPPHTRRSSTVPTGPQVSQQLRSQQQSQQSFSQSQHGMFSQFSQNSLDEIVANDQRFGSQERENSMKRISCLAPVSFTREESQIPISRSSTSLARKWSSASAPDYRCQIGEDLEHRIGMMETSLTRFGMILDSIQSDVMQVNKGMKEFLMEMEGLRQKLTVHDSSLLLMNKGHEDIKDRLDAALKSISDQMNKDLYQDNLQQSFLMLSALPEQIEMCLQKLQNELCKTITKEMQACIIL

SEQ ID NO: 234 - DNA, 282 bp, Vitis vinifera
atgggaagctggaactcagtacaacgagaacgagccactttcccagataggaactccaacaggcagcccaaacagaatggagtttctcctcttgaacgggaaagagaatgcagggttatcattgactctgatgaggaaattgatggaggcttttcctgcttgcttcaggaaaaagaatcaggaaaccatttggtagaggaagtgaaggaagagactgaacgaatcctgaggaaagcaagaaggagaaagagaaaatattctaacactattattttgaattga

SEQ ID NO: 235 - DNA, 1909 bp, Zea mays
caaattcgcagcgcagcgccctcattttgtcattacgttgctctgctcctggctcacctcaccagcgatcactaccggagcaggccatgaagcttaagatcaacaaggcatgcgacctcggctccatctccgtcctccctccccgtaggaccggtgggagcggcggcgcaggaggggcgggttcctccgccgcgcccgtggcggcggggtcgcagcagaggtcgcagccgatgtcgcagcactccttctcgcagggcgttgtggggagcggcggcgcgtcgtcgctcctgcactcgcagtcgcagctctcgcaggcctccctcgacgagaatctcctcaccctccacctcgcctcgcccgctcgcgatcagagattcgggttccatgacgacttatcaaagaagatgacatcgttgcctgtcagctcggcttcttgtgtgcgagaagaatctcagctgcaactggcaaaaacatcaagcaaccctgtccatcgatggaacccttctcttcctgacggtagaagtgtgggtcctactgaggatgttgagcgcaaatttcagcatatggcaagttcagtgcataaggtagggatggtgcttgattcagtgcaaaccgacgttatgcagctaaacagagccatgaaggaagccacactagattctggaagcatacagcaaaagattgttctcctagacgctttgctgcagaaaaatcttaagggacaagatgatctcaaagctcttgttgagagcaacaccaaaagcatctccgatcagctgactgttctgaactcctactccaacaaactggatgagatatcctcaaccctttcaatcttgccaaaacaaatagaaacaaatttgaagcaacagcagagtgacaccttccgaatttttagaaaagacatggaggagattgttagagctgttagatctctcaacaataagattgatgcaatccaaatgccaacagaccagagctgcacaaccaatggaaggcccctgatgaaccaactgccagtcgatagaaatgaaaggccccaggtgaaccaaacaccagaggtaacccgggtgagccaaacaccggtagcaaccatggcgaaccaaagaccagtagcaaaaggaaggcacctggtgagccaaacaccagcagcaaatgggaaacctctgacgaaccaaacatcagtagcaaatggaagatccctgatgagccaagtaccagcagcaaatgggaaacctctgacgaaccaaatagcagtgccaaagggaagacccatgatgaggcagaaaacagcagaaggaggaaggccccagatgaaccaaatacctgtagcagatggatggccccatacaaacaaaatacacgcgccggaagtgcggcatcccgtacctttggtgtgccctgcagcaggcccgaggccgaaggtagaggagggaaagctgagagcggttccccaaaagctaactggttgtagatccagggtgacacctaaacaggaagaggcggcgacgaatacaaaggtcgtcgtcggccgggcagcggcaactgagaaggtggtgatattcatcgacgacgactccgacgatggcggcagcgaggcccttgcttcctgcgtgatcctgaggccggcgcccctggggtcaggtgcaggtgagtgcgacctggtgaaggtgggcgcggaggagagccaggagatcctgaggagggccaggaagcggaggagaagagaaatgcaggccattgtggcctgcatgccgcctgagcttgggtactagtagctagctacttctcatatcaatatatcatggatggatggatgcagttcctaatcgagaaaaagggatagttagttgtgtggttttgttgttgcgatggaatgaatcgagcagcatggatggattggttgatt

SEQ ID NO: 236 - protein, 562 aa, Zea mays
MKLKINKACDLGSISVLPPRRTGGSGGAGGAGSSAAPVAAGSQQRSQPMSQHSFSQGVVGSGGASSLLHSQSQLSQASLDENLLTLHLASPARDQRFGFHDDLSKKMTSLPVSSASCVREESQLQLAKTSSNPVHRWNPSLPDGRSVGPTEDVERKFQHMASSVHKVGMVLDSVQTDVMQLNRAMKEATLDSGSIQQKIVLLDALLQKNLKGQDDLKALVESNTKSISDQLTVLNSYSNKLDEISSTLSILPKQIETNLKQQQSDTFRIFRKDMEEIVRAVRSLNNKIDAIQMPTDQSCTTNGRPLMNQLPVDRNERPQVNQTPEVTRVSQTPVATMANQRPVAKGRHLVSQTPAANGKPLTNQTSVANGRSLMSQVPAANGKPLTNQIAVPKGRPMMRQKTAEGGRPQMNQIPVADGWPHTNKIHAPEVRHPVPLVCPAAGPRPKVEEGKLRAVPQKLTGCRSRVTPKQEEAATNTKVVVGRAAATEKVVIFIDDDSDDGGSEALASCVILRPAPLGSGAGECDLVKVGAEESQEILRRARKRRRREMQAIVACMPPELGY

SEQ ID NO: 237 - DNA, 2021 bp, Zea mays
atgacgggagcaggcatgaagcttaagatcaacaaggcatgcgacctcagctccatctccgtcctccctccccgtaggaccggagggagtggcggcgcaggttcctcggccgcggccgcggctgtggcggcggggtcgcagcagcggtcccagccgctgtcgcagcaatccttctcgcagggcgctgtggggagcggcggcgcgtcgtcgctcctgcactcgcagtcgcagctatcgcaggcctccctcgacgagaacctcctcacactccacctcgcttcgcccgcgcgcgaccagggattcaggttgcatgacgactcatcaaagaagatgacatcgttgcctgtcacctcagcttcttgtgtgcgagaagaatctcagctgcaactggcaaaaacatcaagcaaccctgtccatcgatggaacccttctcttcctgatagtagatgcagtggtttaacaggtgtggttcctgctgaggatgttgagcgcaaatttcagcatatggcaagttcagtgcataaggtagggatggtgctcgattcagtgcaaaacgacactatgcagttaaacagagccatgaaggaagctgcactagattctggaagcatacagcaaaagattgttgtcctcgacacttcgatgcagaaaaatcttaagggacaaggtgatctcaaagtgcttgttgagagcaacacaaaaaacattgctgatcagctggctgttctgaactcccactccaacaaactggttgagatatcctcagccctttcagtcttgccgaaacaaatagaaagagatttaaagcaacaacagagtgacatcttcagaatttttagaaacaacatggaggagattgctagagctgtcaaatctctcaacagtaagatcgatgcaatccaaatgccaacagagcagagatgcacaaccaatggaaggcccctgatgaaccaactaccagtcgatagaaacgaaaggcctcaggtgaaccaaacaccagaggtaacccgggtgagccagacaacagtagcaagcttagtgaaccaagcaccagcagcaaatggaaggcacctgatgagcaaaacaccagcagcaaatgggaaaagtgtgatgagacaaacaccagcagaaaatggaaggcacctagtgagccaaacacctgcagcaaatggaaaaactctgaagagacaaacatcagtaacaaatggaatttccctgatgagccaagtaccagcagcaaatgggaaacctgtggtgatccaaataccagcaccaaaaggaagacctatgatgaggcagaaaacagcagaaagcggaaggaccgagatgaacgaaatacccgtagcaagtggacgaccccatacaaacaaaatacccatagcggaagtgcatcccgcacctttggtgtgccctgcaaagcaggtagcaacagacccgaagcccaaggtagacgaggaaaagctgaaagcgcttccccaaaagctaactagttctagatccagggtggcacctaaacaggaagaggcggcaaatacaaaggtcatcagccgggcagcggcaactgagaaggtggtgatattcatcgacgactctgacgatgacaacgacgtccgtgcttcctgcgtgatcctcaggccctcgggatcaggcagcttaggtgagagggaatgcgacctgatgaaggtgggcgcggaggagagccaggagatcccgcggagggccaggaagcggaggagaagagaaatgcaggccactgtgggtgtggcatgtatgccgctgcctgcctgagcttcggtatggttgactgattggtataattgactgattaattgatgcggtcggtaatttagagcagtgtttgcactgcactgcatactctataaaaggaacagtagtagataggtgaacatgaatgaatgaggacaggaaaacaaaggatcagggttatattatgaatatagtagagagaaacacagttttgttgtggtgtttgttgtgttataataaatcatattggaggt

SEQ ID NO: 238 - protein, 595 aa, Zea mays
MTGAGMKLKINKACDLSSISVLPPRRTGGSGGAGSSAAAAAVAAGSQQRSQPLSQQSFSQGAVGSGGASSLLHSQSQLSQASLDENLLTLHLASPARDQGFRLHDDSSKKMTSLPVTSASCVREESQLQLAKTSSNPVHRWNPSLPDSRCSGLTGVVPAEDVERKFQHMASSVHKVGMVLDSVQNDTMQLNRAMKEAALDSGSIQQKIVVLDTSMQKNLKGQGDLKVLVESNTKNIADQLAVLNSHSNKLVEISSALSVLPKQIERDLKQQQSDIFRIFRNNMEEIARAVKSLNSKIDAIQMPTEQRCTTNGRPLMNQLPVDRNERPQVNQTPEVTRVSQTTVASLVNQAPAANGRHLMSKTPAANGKSVMRQTPAENGRHLVSQTPAANGKTLKRQTSVTNGISLMSQVPAANGKPVVIQIPAPKGRPMMRQKTAESGRTEMNEIPVASGRPHTNKIPIAEVHPAPLVCPAKQVATDPKPKVDEEKLKALPQKLTSSRSRVAPKQEEAANTKVISRAAATEKVVIFIDDSDDDNDVRASCVILRPSGSGSLGERECDLMKVGAEESQEIPRRARKRRRREMQATVGVACMPLPA

SEQ ID NO: 239 - DNA, 939 bp, Arabidopsis thaliana
atgggagaaatgattgtttcaatggaccaagatatccgactggatacaacacgagcaagattgtcaaaccttctcaagaggcatcgagaattgtcagaccgtcttactagggattctgataagacaatgttagatcgcttaaacaaagaatttgaagctgcacggagatcccaaagtcaggaagtcttcttagatggggaagagtggaatgatggtttgttggccacattaagggaacgggtgcatatggaagctgacagaaaggcagataacggtaatgcaggtttttcactagtttgtcatcctgaagaacgaattacttacagagtgggaaataaggtgatatgttgcctagatggatcgagaattggaatacagtttgaaacatctactgcaggagaaacttacgaggtttaccactgtgtgcttgagagcaagtcgtttttggagaagatgattgtgcttgagcacacaattcctttctttttgccgctaagtgacttggaaaatgatcttcttttttcgaatgctaagaaattcatcgataatgttggggatctcctgcaagcatatgtggacagaaaggaacaggtccggcttatcaaagagctctttggacatcagatcagtgagatttatcacagtcttccttaccacatgattgaattttctatggatgattgtgactgcaagttcgtggtgagccttagatatggagatcttctgtgtgaacttccgacaaaagtgagaattctagtatggccaatgcatcatctgtcgaagaaacagtgtacaagccctggaagtccagcaatccctgtgcgtttaccatttgccgaggatgctttccggatccaatcactacctgaagcatacgcagagattatgccgaacatgccgaatgaaattcggcaattatttcagactagtccaagctaa

SEQ ID NO: 240 - protein, 312 aa, Arabidopsis thaliana
MGEMIVSMDQDIRLDTTRARLSNLLKRHRELSDRLTRDSDKTMLDRLNKEFEAARRSQSQEVFLDGEEWNDGLLATLRERVHMEADRKADNGNAGFSLVCHPEERITYRVGNKVICCLDGSRIGIQFETSTAGETYEVYHCVLESKSFLEKMIVLEHTIPFFLPLSDLENDLLFSNAKKFIDNVGDLLQAYVDRKEQVRLIKELFGHQISEIYHSLPYHMIEFSMDDCDCKFVVSLRYGDLLCELPTKVRILVWPMHHLSKKQCTSPGSPAIPVRLPFAEDAFRIQSLPEAYAEIMPNMPNEIRQLFQTSPS

SEQ ID NO: 241 - DNA, 1452 bp, Brassica napus
gtcccgtcgctggtcttaagtctctgttcctccgcctgatcttacccggcgattgcgacggctcttcgcctctccccgccaattcgacctgttttcttctctactcgtcggcgtcggtgagcttggtcaattgggagctctctggaaagcaaagatgggagagatgattgtttcgctggacgaagacattccattggattcaacacgagcacgattcacgaatcttctcaagaggcatcaacaattgacagaccgtcttaccagggattctgataagatgatatttgatcggttaagcaaagaatttgaagctgcacgggcttcccaaaatcaagaagtatgcttagatggggaagagtggaatgatggcttgttggctacactaagagaacgggtgcatatggaggctgacaaaaaggagagcgggaattcaggttttgcaccagtttctcatcttgaagaacgaattgcttacagggtgggaaataaggtgatttattgcttagagggagcgagaattggaatacagtatgaaacatcttttgcaggagaaacttacgagatttaccactgtgtgcttgagagcaagtcgtttttggagaagatgaatgtacttgagcacacaattccattctttttgccactacgtgacttggaaaatgatctactttcttcgaatgctaagaaattcatcgataatgttggggatctcctgcacgcatatgtggaaaggagggagcaggtccggcttatcaaagagctctacggaaatcagatcagggagctttatcacagtcttccttaccacatgattgaatttgcgatagatgattgtgactgcaaggtggtggtgagcctgagatatgggaatcttatgtgtgaacttccgacaaaagtgagagttctagcatggccaatgcaccagctgaagaggcagtgcacaagccctaggttaagcaaacttgcaagtcaagcaatccctgtgcgtttatcttttgccgaggatgccttaaggatccaatcactacctgaagcatacgcagagattgtagtaaacatgccacaagaaattgagcaaatatttctgtagaggagttggagctaagactgaagctttctctaaatcatatatatatatatctcgctgctttcttgtgtgatatttggtgataatccttctaacaatgttaaaattgtgccacagaattgattctgttctgcgtttctgttactatgtttcattcaacttggaagttaagagtagctgtaaaaaagtttacaaattaaactaaacttgtctattgtaggtttgattcaattatcagagacataatgtatatagcctagttagatgttttttggatggtccaccagtataatatttctcatattaaaggccttagttgaagtaattgtaaatataaaaataaaagtaatgttactatagtctac

SEQ ID NO: 242 - DNA, 1095 bp, Brassica rapa
atgaagcgtgagggttcttttcatctttgtatcggtgttggatggtttgttatagctgatgagctactctttgtaaaggaatctccgtttcaaattttggaatattgtgttgagttaggactagttatcgtaggattgttcataagaaaaactggggactttagatgtgatattgtttcgctggacgatgacattccactggattcaacacgagcacgattcacgaatcttctcaagaggcatcaacaattgactgaccgtcttaccagggattctgataaaatgatatttgatcggttaagcaaagaatttgaagctgcacgggcatcccaaagtcaagaagtatgcttagatggggaagagtggaatgatggcttgttggctacactaagagaacgggtgcatatggaggctgacaaaaaggatagcggcaattcaggttttgcaccagtttctcatcttgaagaacgaattgcttacagagtgggaaataaggtgatctattgcttagagggagcaaggattggaatacagtatggaacatcttttgcaggagaaacttacgagatttaccactgtgtgcttgagagcaagtcgtttctggagaagatgaatgtacttgagcacacaattccattctttttgccactgcgtgacttggaaaatgttcttctttcttcgaatgctaagaaattcatcgataatgttggggatctcctgcacgcatatgtggagaggagggagcaggttcggcttatcaaagagctctatggaaatcagatcagggagctttatcatagtcttccttaccacatgattgaatttgccatagatgattgtgactgcaaggtggtggtgagcctgagatatgggaatcttatgtgtgaacttccgacaaaagtgagagttctagcatggccaatgcaccagctgaagaggcagtgcacaagccctaggttaagcaaacttgctagccaagcaatccctgtgcgtttatcttttgccgaggatgccttaaggatccaatcactacctgaagcatacgcagagattgtagtaaacatgccacaagaaattgagcaaatatttctgtag

SEQ ID NO: 243 - protein, 364 aa, Brassica rapa
MKREGSFHLCIGVGWFVIADELLFVKESPFQILEYCVELGLVIVGLFIRKTGDFRCDIVSLDDDIPLDSTRARFTNLLKRHQQLTDRLTRDSDKMIFDRLSKEFEAARASQSQEVCLDGEEWNDGLLATLRERVHMEADKKDSGNSGFAPVSHLEERIAYRVGNKVIYCLEGARIGIQYGTSFAGETYEIYHCVLESKSFLEKMNVLEHTIPFFLPLRDLENVLLSSNAKKFIDNVGDLLHAYVERREQVRLIKELYGNQIRELYHSLPYHMIEFAIDDCDCKVVVSLRYGNLMCELPTKVRVLAWPMHQLKRQCTSPRLSKLASQAIPVRLSFAEDALRIQSLPEAYAEIVVNMPQEIEQIFL

SEQ ID NO: 244 - DNA, 1462 bp, Glycine max
gaagaaggcatcaccgcgttgtgttgtgattgaaaatggagagcgatgtcgaagaatctctgcggaagaggcccagaaaataccctttctccgccgattcatcttctcgcaagcaatttgaacaatattctggacggacatttgcatttacgggggaagtgaattttatgcaagatgatgataatcgtctggagattacccgaactaaatttggaagtttgcttaaaagacacggagatttgacagagcgtcttgctagggattctgacaagataatatttgagcgtctacagaaggagtttgaagctgcacgagcttctcaaactgaagagatatgtttagacggggaagagtggaatgatggactactagctacaataagagagcgggtgcatatggaggcagacagaaaagcaatgcatggggatgctgacatattagcatgtcctcaggataaaattacatataaaattggaaacaaggtaatttgctgtttggaaggggcaagaattggtgtacaatatgagacatcttttgctggtgaaccttgtgagttttaccattgtgtgctggagagtaagtcatttcttgaaaagatgactgtccttgaacatacagttccatttttcctgccaatacgagaaatagaaaatgatctcctttcatccaatgcaatgaaattcatagatcatgttggagatctattgcaggcttttgtggatagacgggaacaggtcagacttataaaggagctgtatggaaatcaaattagagagctgtatcatagccttccctaccatatgatcgaatttgtattggatgattctgattgcaaggtgacagtcagccttagatatgcagatctcatttcggtgcttccaactcgaatttcagtgctagcctggcctatgttcaataaaaatactatggctactttgagcaggaaggaagatggactctcaggaagtcattcttctccaattcgcttaacctatgcagaagatgccttacgaaccatgagtttacctgaagcatatgcagagattgtattaaacttaccacaggcgcttcagcagacgtatcatcaaaaagcccctgcttagagcttcgccctttgagtagcctagatgcatcagtaaaaattcttggtagagatgttaaatattagataaacaacttcagaattattacctattcacctagccaaattgctcataggttgagttcattttgctgtaatattgtcatatagcatttagcatttgtatttcggcctctctggcctcgttattccttcaatacctgctacggtgtcttgtatcattaatacaacagggctaggtttacatctattcaaactgttgtcattcatcttttctccataattcaacatgtatgtaatttgatttcatataagttccatcttttttacatggcaagcaaaaatagcaagtatgaaggc

SEQ ID NO: 245 - protein, 355 aa, Glycine max
MESDVEESLRKRPRKYPFSADSSSRKQFEQYSGRTFAFTGEVNFMQDDDNRLEITRTKFGSLLKRHGDLTERLARDSDKIIFERLQKEFEAARASQTEEICLDGEEWNDGLLATIRERVHMEADRKAMHGDADILACPQDKITYKIGNKVICCLEGARIGVQYETSFAGEPCEFYHCVLESKSFLEKMTVLEHTVPFFLPIREIENDLLSSNAMKFIDHVGDLLQAFVDRREQVRLIKELYGNQIRELYHSLPYHMIEFVLDDSDCKVTVSLRYADLISVLPTRISVLAWPMFNKNTMATLSRKEDGLSGSHSSPIRLTYAEDALRTMSLPEAYAEIVLNLPQALQQTYHQKAPA

SEQ ID NO: 246 - DNA, 1374 bp, Glycine max
accgcgttgtgttgtgattgaaaatggagagcgatgttgaagaatctatgcggaagaggcccagaaaatatcctttctccgccgattcatcctctcgcaagcaatttgaacaatattctggacggacatttgcaattatgggggaagtgaattttatgcaagatgatgataatcgtttggagattacccgaactaaatttggaagtttgcttaaaagacatggagatttgacagagcggcttgctagggattctgacaagataatatttgagcgtctacagaaggagtttgaagctgcacgagcttctcaaactgaagagatatgtttagacggggaagagtggaatgatggtctactagctacaataagagagcgggtgcatatggaggcggacagaaaagcaatgcaaggggatgcggacatattagcatgtcccctggaaaaaattacatataaaattggaaacaaggtaatttgctgtttggaaggggcaagaatcggcgtacaatatgagacatcgtttgctggtgaaccttgtgagttttaccattgtgtgctggaaagcaagtcatttcttgaaaagatgactgtccttgaacacacagttccatttttcctgccaatacgagaaatagaaaatgatctccattcatccaatgcaatgaaactcatagatcatgttggagatctattgcaggcttttgtggatagacgggaacaggtcagacttataaaggagctgtatggaaatcagattagagagctgtatcatagccttccctaccatatggtcgaatttgtattagatgattctgattgcaaggtgacagtcagccttagatatgcagatctcatttcggtgcttccaactcgaatttcagtgctagcctggcctatgttcaataaaaatactatgagtaggaaggaagatggactctcgggaagtcattcttccccaattcgcctaacatatgcagaagatgccttacgaaccatgagtttacccgaagcatatgcagagattgtattaaacttaccacaggcgattcggcagacgtatcatcaaaaagccaccgcttagagctttgccctttcagtagcctagatgcatctgtaaaaattcttggtagagatgttaaatattagaaaaacaacttcagaattattacctatttacctagtcaaattgctcaggttgagttcattttgctgtaatattgtcatatagcatttagcatttgtacttcggcctctctggcctcgttattccttcaatacctactccggtgtcttgtatcattaatacaacagggctaggtttacatctattcaaactgctgtcattcatcttttcttcataattcaatatgtat

SEQ ID NO: 247 - protein, 352 aa, Glycine max
MESDVEESMRKRPRKYPFSADSSSRKQFEQYSGRTFAIMGEVNFMQDDDNRLEITRTKFGSLLKRHGDLTERLARDSDKIIFERLQKEFEAARASQTEEICLDGEEWNDGLLATIRERVHMEADRKAMQGDADILACPLEKITYKIGNKVICCLEGARIGVQYETSFAGEPCEFYHCVLESKSFLEKMTVLEHTVPFFLPIREIENDLHSSNAMKLIDHVGDLLQAFVDRREQVRLIKELYGNQIRELYHSLPYHMVEFVLDDSDCKVTVSLRYADLISVLPTRISVLAWPMFNKNTMSRKEDGLSGSHSSPIRLTYAEDALRTMSLPEAYAEIVLNLPQAIRQTYHQKATA

SEQ ID NO: 248 - DNA, 1465 bp, Glycine max
gaagaaggcatcaccgcgttgtgttgtgattgaaaatggagagcgatgtcgaagaatctctgcggaagaggcccagaaaataccctttctccgccgattcatcttctcgcaagcaatttgaacaatattctggacggacatttgcatttacgggggaagtgaattttatgcaagatgatgataatcgtctggagattacccgaactaaatttggaagtttgcttaaaagacacggagatttgacagagcgtcttgctagggattctgacaagataatatttgagcgtctacagaaggagtttgaagctgcacgagcttctcaaactgaagagatatgtttagacggggaagagtggaatgatggactactagctacaataagagagcgggtgcatatggaggcagacagaaaagcaatgcatggggatgctgacatattagcatgtcctcaggataaaattacatataaaattggaaacaagcaggtaatttgctgtttggaaggggcaagaattggtgtacaatatgagacatcttttgctggtgaaccttgtgagttttaccattgtgtgctggagagtaagtcatttcttgaaaagatgactgtccttgaacatacagttccatttttcctgccaatacgagaaatagaaaatgatctcctttcatccaatgcaatgaaattcatagatcatgttggagatctattgcaggcttttgtggatagacgggaacaggtcagacttataaaggagctgtatggaaatcaaattagagagctgtatcatagccttccctaccatatgatcgaatttgtattggatgattctgattgcaaggtgacagtcagccttagatatgcagatctcatttcggtgcttccaactcgaatttcagtgctagcctggcctatgttcaataaaaatactatggctactttgagcaggaaggaagatggactctcaggaagtcattcttctccaattcgcttaacctatgcagaagatgccttacgaaccatgagtttacctgaagcatatgcagagattgtattaaacttaccacaggcgcttcagcagacgtatcatcaaaaagcccctgcttagagcttcgccctttgagtagcctagatgcatcagtaaaaattcttggtagagatgttaaatattagataaacaacttcagaattattacctattcacctagccaaattgctcataggttgagttcattttgctgtaatattgtcatatagcatttagcatttgtatttcggcctctctggcctcgttattccttcaatacctgctacggtgtcttgtatcattaatacaacagggctaggtttacatctattcaaactgttgtcattcatcttttctccataattcaacatgtatgtaatttgatttcatataagttccatcttttttacatggcaagcaaaaatagcaagtatgaaggc

SEQ ID NO: 249 - protein, 356 aa, Glycine max
MESDVEESLRKRPRKYPFSADSSSRKQFEQYSGRTFAFTGEVNFMQDDDNRLEITRTKFGSLLKRHGDLTERLARDSDKIIFERLQKEFEAARASQTEEICLDGEEWNDGLLATIRERVHMEADRKAMHGDADILACPQDKITYKIGNKQVICCLEGARIGVQYETSFAGEPCEFYHCVLESKSFLEKMTVLEHTVPFFLPIREIENDLLSSNAMKFIDHVGDLLQAFVDRREQVRLIKELYGNQIRELYHSLPYHMIEFVLDDSDCKVTVSLRYADLISVLPTRISVLAWPMFNKNTMATLSRKEDGLSGSHSSPIRLTYAEDALRTMSLPEAYAEIVLNLPQALQQTYHQKAPA

SEQ ID NO: 250 - DNA, 1077 bp, Medicago truncatula
atgcgattcgttgaaacggagagcgatgcggaagaatctatgcgaaagagactccgtagtaattcctttcactccgccgattatccctctcgcaacaagtttgaacaatatgctggacggacctatgcacccatgggggaaatgaattttatgcagcagcaagatgatgatagtcgcttggatattacacgagccaaatttggaagtttgcttaaaagacatgaaaatttggctgaccgtctttctagagattctgacaaggtaatatttgagcgtctaatcaaagagtttgaagctgcacgagcttctcaaactcaagagatatatttagatggggaacagtggaatgatggcctacttgctacagtaagagagcaggtgcatatggaggcagagagaaaagcattgtctggagatgctgacgtattaacaggtcatcaagaaaaagttacatacaaaactggaaacaagataatttgctgtttggaaggagcaagaattggcatacagtatgagacatcttttgctggtgaaatctgtgagttttaccactgcgtgctggagagcaagtcatttcttgaaaagatgactgtccttgagcacacagttccatttttcttgccaatacgtgaaacagaaaatgatcttctttcatccaatgcaatgaaattcatagatcatgttggagatctattgcaagcatacgtggatagacgggaacaggttagacttataaaggaactttatggaaatcaaattggagagctgtatcatagccttccttatcacatgatcgagtttgtattagatgattttgactgcaaagtgacagtcagccttcgatacacagatctcatttcggtgcttccaactcgaatctcagtgctagcctggccaatgttgaagataaattctactccaattttcaacatgatggaagatggaatctcaggaagtcatcctgctccagttcgactatcctatgctgaagatgccttacgaaccatgagtctaccagaagcatatgcagagattgtgttgaatcttccacaagctcttcagcagatatatcattaa

SEQ ID NO: 251 - protein, 358 aa, Medicago truncatula
MRFVETESDAEESMRKRLRSNSFHSADYPSRNKFEQYAGRTYAPMGEMNFMQQQDDDSRLDITRAKFGSLLKRHENLADRLSRDSDKVIFERLIKEFEAARASQTQEIYLDGEQWNDGLLATVREQVHMEAERKALSGDADVLTGHQEKVTYKTGNKIICCLEGARIGIQYETSFAGEICEFYHCVLESKSFLEKMTVLEHTVPFFLPIRETENDLLSSNAMKFIDHVGDLLQAYVDRREQVRLIKELYGNQIGELYHSLPYHMIEFVLDDFDCKVTVSLRYTDLISVLPTRISVLAWPMLKINSTPIFNMMEDGISGSHPAPVRLSYAEDALRTMSLPEAYAEIVLNLPQALQQIYH

SEQ ID NO: 252 - DNA, 1107 bp, Oryza sativa
atggcgaaggcgcggcgcggtggtcatcggaggtgcaggcgacggcggctgtgtgccgggacgggtgcgagggctcgcggagggcggggctgggatgggggcggatgggagggggcacggggacggggagccatgggaggggtccccgcaggggcctttggcctgtggttctccatggaggagagctcgcgcgaaggcagatggtggccgccggcgagagctgatggtgatggagggaggaagaagatgagaggaggggattctgataaactgatttttgagcggctacagagagaatttgaggctgcacgaactgcccaaactgaagagatcccaatagatgatgagcagtggaacgatggtttgctggcaaccatccgtgaaaaggtccatatggaggctgataggaaggccatggctaaccaagcaaatgttccagcagatcctcaattccagtcaaggactacatatagagtaaaaaacaaggttatctattgtttggatggtgcgagaattggtatacagtatgagacttattttgctggagaaccttgtgaaatttatcattgtgttttggaaagcaagtcattccttgaaaagatgactgtgattgagcacaccttacctttctttctgccaatacgagaagtagaaagtgaatttctatcatctaatgctattaaatttattgatcatcttgaagagattttgcagtcttatgttgacaggagggagcaggttcggcttatcaaggaactatatgggaaccaaattggagaactgttccacagtctctcttacaatttgatagaatttgtaatggaggattttgagtgcaaggttacagtcagtatccgatactcagatctattgttcaccctgccaagtcaggccagggtcctggcttggccacttcgctcttcgcggggaatatcagtaactgagcgcagagctagtcgctcagcatctgctcaactagtaccgttccgccttccctacgccgaggatgcgctgaagaccttgagtttgccagaagcgtttgcggagattgtgctgagcctaccccgtgctctgaagcggatactctcttctcaggaaagtgattga

SEQ ID NO: 253 - protein, 368 aa, Oryza sativa
MAKARRGGHRRCRRRRLCAGTGARARGGRGWDGGGWEGARGRGAMGGVPAGAFGLWFSMEESSREGRWWPPARADGDGGRKKMRGGDSDKLIFERLQREFEAARTAQTEEIPIDDEQWNDGLLATIREKVHMEADRKAMANQANVPADPQFQSRTTYRVKNKVIYCLDGARIGIQYETYFAGEPCEIYHCVLESKSFLEKMTVIEHTLPFFLPIREVESEFLSSNAIKFIDHLEEILQSYVDRREQVRLIKELYGNQIGELFHSLSYNLIEFVMEDFECKVTVSIRYSDLLFTLPSQARVLAWPLRSSRGISVTERRASRSASAQLVPFRLPYAEDALKTLSLPEAFAEIVLSLPRALKRILSSQESD

SEQ ID NO: 254 - DNA, 1194 bp, Setaria italica
atgggctcccgcacctcgcctcctcacgactatcttcacatgcatgttgagcaactaaggaggcgacatcagtcattatcagaattgacttttgcaagggatgaagatgcaaaacttgagaccacaagggcaaggctgtcaaacatcctcaaaaggcatgaagacttgaaagagcgcctttcacgggattctgataagctgatttttgagcgtctgcagaaagaatttgaggctgctcgagctgctcaaactgaagaaatttcaatagatgatgatgattggaatgatggtttgctagctaccatccgtgagaaggtccatatggaggctgacaggaaggccatggctaaccaagtaaatgttccagcagatcttccatttcaatcaaagactacatataggattagaaataaggttatctattgcttggatggagcgagaattggcatacagtatgagacattctttgctggtgagccttgtgaaatatttcattgtgttttggaaagcaagtcattcctggaaaagatgactgtgattgagcacaccttacctttctttctgcccatacgcgaattggaaagtgatctcctgtcatctaatgccattaaatttattgatcaccttgaagaaattttacaggcttatattgacaggagagaacaggttcggcttatcaaggagctctatgggaaccaaattggcgaactgttccacagtcttccttacaatgtgatagagtttgtcttggaggattttgagtgcaagattacagtcagtatccgatattcagatctacttctgaccctgccgagtcaggcaagggtcttggcttggccacttcgctcgtccaagagaatatccacacgaagcagcagtgcgtcagctgcacagccggtaccatttcacctttcatacgctgaggaagcactcaagacattgtgtctaccagaaggtccctatgctgccccttgtcttcaccttgccgtacaatatacccacaggtttgtgcggaactttgttctgatctgtttcctccctccctgttctgtgtttcagcttacgcggacattgtgctggacctaccccatgctctcaagaggattctcacctctcaggacagtgactgaatcatgcgtaggggatgctaatgaaattaaggatttcagactacaaacatggaactggtgttga

SEQ ID NO: 255 - protein, 397 aa, Setaria italica
MGSRTSPPHDYLHMHVEQLRRRHQSLSELTFARDEDAKLETTRARLSNILKRHEDLKERLSRDSDKLIFERLQKEFEAARAAQTEEISIDDDDWNDGLLATIREKVHMEADRKAMANQVNVPADLPFQSKTTYRIRNKVIYCLDGARIGIQYETFFAGEPCEIFHCVLESKSFLEKMTVIEHTLPFFLPIRELESDLLSSNAIKFIDHLEEILQAYIDRREQVRLIKELYGNQIGELFHSLPYNVIEFVLEDFECKITVSIRYSDLLLTLPSQARVLAWPLRSSKRISTRSSSASAAQPVPFHLSYAEEALKTLCLPEGPYAAPCLHLAVQYTHRFVRNFVLICFLPPCSVFQLTRTLCWTYPMLSRGFSPLRTVTESCVGDANEIKDFRLQTWNWC

SEQ ID NO: 256 - DNA, 1026 bp, Setaria italica
atgggctcccgcacctcgcctcctcacgactatcttcacatgcatgttgagcaactaaggaggcgacatcagtcattatcagaattgacttttgcaagggatgaagatgcaaaacttgagaccacaagggcaaggctgtcaaacatcctcaaaaggcatgaagacttgaaagagcgcctttcacgggattctgataagctgatttttgagcgtctgcagaaagaatttgaggctgctcgagctgctcaaactgaagaaatttcaatagatgatgatgattggaatgatggtttgctagctaccatccgtgagaaggtccatatggaggctgacaggaaggccatggctaaccaagtaaatgttccagcagatcttccatttcaatcaaagactacatataggattagaaataaggttatctattgcttggatggagcgagaattggcatacagtatgagacattctttgctggtgagccttgtgaaatatttcattgtgttttggaaagcaagtcattcctggaaaagatgactgtgattgagcacaccttacctttctttctgcccatacgcgaattggaaagtgatctcctgtcatctaatgccattaaatttattgatcaccttgaagaaattttacaggcttatattgacaggagagaacaggttcggcttatcaaggagctctatgggaaccaaattggcgaactgttccacagtcttccttacaatgtgatagagtttgtcttggaggattttgagtgcaagattacagtcagtatccgatattcagatctacttctgaccctgccgagtcaggcaagggtcttggcttggccacttcgctcgtccaagagaatatccacacgaagcagcagtgcgtcagctgcacagccggtaccatttcacctttcatacgctgaggaagcactcaagacattgtgtctaccagaagcttacgcggacattgtgctggacctaccccatgctctcaagaggattctcacctctcaggacagtgactga

SEQ ID NO: 257 - protein, 341 aa, Setaria italica
MGSRTSPPHDYLHMHVEQLRRRHQSLSELTFARDEDAKLETTRARLSNILKRHEDLKERLSRDSDKLIFERLQKEFEAARAAQTEEISIDDDDWNDGLLATIREKVHMEADRKAMANQVNVPADLPFQSKTTYRIRNKVIYCLDGARIGIQYETFFAGEPCEIFHCVLESKSFLEKMTVIEHTLPFFLPIRELESDLLSSNAIKFIDHLEEILQAYIDRREQVRLIKELYGNQIGELFHSLPYNVIEFVLEDFECKITVSIRYSDLLLTLPSQARVLAWPLRSSKRISTRSSSASAAQPVPFHLSYAEEALKTLCLPEAYADIVLDLPHALKRILTSQDSD

SEQ ID NO: 258 - DNA, 924 bp, Setaria italica
atgaagatgcaaaacttgagaccacaagggcaagtgtcaaacatcctcaaaaggcatgaagacttgaaagagcgcctttcacgggattctgataagctgatttttgagcgtctgcagaaagaatttgaggctgctcgagctgctcaaactgaagaaatttcaatagatgatgatgattggaatgatggtttgctagctaccatccgtgagaaggtccatatggaggctgacaggaaggccatggctaaccaagtaaatgttccagcagatcttccatttcaatcaaagactacatataggattagaaataaggttatctattgcttggatggagcgagaattggcatacagtatgagacattctttgctggtgagccttgtgaaatatttcattgtgttttggaaagcaagtcattcctggaaaagatgactgtgattgagcacaccttacctttctttctgcccatacgcgaattggaaagtgatctcctgtcatctaatgccattaaatttattgatcaccttgaagaaattttacaggcttatattgacaggagagaacaggttcggcttatcaaggagctctatgggaaccaaattggcgaactgttccacagtcttccttacaatgtgatagagtttgtcttggaggattttgagtgcaagattacagtcagtatccgatattcagatctacttctgaccctgccgagtcaggcaagggtcttggcttggccacttcgctcgtccaagagaatatccacacgaagcagcagtgcgtcagctgcacagccggtaccatttcacctttcatacgctgaggaagcactcaagacattgtgtctaccagaagcttacgcggacattgtgctggacctaccccatgctctcaagaggattctcacctctcaggacagtgactga

SEQ ID NO: 259 - protein, 307 aa, Setaria italica
MKMQNLRPQGQVSNILKRHEDLKERLSRDSDKLIFERLQKEFEAARAAQTEEISIDDDDWNDGLLATIREKVHMEADRKAMANQVNVPADLPFQSKTTYRIRNKVIYCLDGARIGIQYETFFAGEPCEIFHCVLESKSFLEKMTVIEHTLPFFLPIRELESDLLSSNAIKFIDHLEEILQAYIDRREQVRLIKELYGNQIGELFHSLPYNVIEFVLEDFECKITVSIRYSDLLLTLPSQARVLAWPLRSSKRISTRSSSASAAQPVPFHLSYAEEALKTLCLPEAYADIVLDLPHALKRILTSQDSD

SEQ ID NO: 260 - DNA, 1730 bp, Sorghum bicolor
gggaggagaacgccgccggagccaccttgccggaccggaaacagcgaatcggatcgcatcaaagctgcctagtcatcccccccctccccgaccggaactcgctgcaatccgtcgcaggtcgccggggccgtggacgccgggccgccgtcgccaaacggaagacgctgcctcctagccgctgccgcagggaggtaccgtctcggggccgcaactgcaggggcgaattgtcgctcagcaggcggtcagattcatggcgcccacggagacttatgcaagggacgacgatgcaaaacttgaggccacacgtgcaaggctgtcaaacatcctcagaaggcatgaagatctgaaagagcgcctttcacgggattctgataagctgatttttgagcgcctacagaaagaatttgaggctgcacgagctgctcaaaccgaagatggtttggatccttcagttagccagattttatctgtagatcacagaattgtctacacattcttttggcattctgtagagatttcaatagatgatgatgagtggaatgatggtttactggcaaccatccgtgagaaggtccatatggaggctgataggaaggccatggccaaccaagtaaatgttccagcagatcttccatttcaatcaaggactacatataggattagaaataaggtagcatttgctccccagatcattgccttttctaatatagttttgtatatggttagcatgtctgctgagattggtgctgctttggttatctattgcttggatggagcgaggattggcatacagtatgagacattctttgctggcgagccttgtgaaatttttcattgtgttttggaaagcaagtcattcctggaaaagatgattgtgattgaacacaccttgcctttctttctgcccatacgtgaattagaaagtgatctcttgtcatctaattccattaaattcattgatcatcttgaagaaattttacaggcttatattgacaggagagagcagcttctaccatttggccaatcaactgttgaggcatttatagctgtaaagatgggtcaagtgtggaaggttcgtcttatcaaggagctctacgggaaccaaattggcgagctgttccatagtcttccttacaatatgatcgagtttgtattggaggattttgagtgcaaggttacaatcagtatccgatattcggatctactgcagaccctgccgagtcaagcaagggtcttggcttggccacttcgctcggccaagagaatatccacaagaagcagcagtgcatcagctgcgcaaccagtaccttttcacctttcatacgccgaggaagcactcaagaccttgtgtctaccagaagcatacgcagacattgtgctggagctacctcatgctctgaagaggattttctcctctcgggacagtgactgaatcctgacctcaaggtctctgtaagattcacatctcaatcttgggaggtgggacaggtgtttgaagatatattgttgagaatcttgtggtagtatagcctgcagttgtggactgcaattcctgtgaaagcaaggcagacacatttgctccgttgaccgctctaaggtccagcccgttgcgaaaaaattttcgagctactgtagcattttcgtttttatgtggcaattattgttcaattatggactaactggactcaaaagattcgtcttgttaattacagataaattgtgtaattagt

SEQ ID NO: 261 - protein, 393 aa, Sorghum bicolor
MAPTETYARDDDAKLEATRARLSNILRRHEDLKERLSRDSDKLIFERLQKEFEAARAAQTEDGLDPSVSQILSVDHRIVYTFFWHSVEISIDDDEWNDGLLATIREKVHMEADRKAMANQVNVPADLPFQSRTTYRIRNKVAFAPQIIAFSNIVLYMVSMSAEIGAALVIYCLDGARIGIQYETFFAGEPCEIFHCVLESKSFLEKMIVIEHTLPFFLPIRELESDLLSSNSIKFIDHLEEILQAYIDRREQLLPFGQSTVEAFIAVKMGQVWKVRLIKELYGNQIGELFHSLPYNMIEFVLEDFECKVTISIRYSDLLQTLPSQARVLAWPLRSAKRISTRSSSASAAQPVPFHLSYAEEALKTLCLPEAYADIVLELPHALKRIFSSRDSD

SEQ ID NO: 262 - DNA, 1728 bp, Sorghum bicolor
gggaggagaacgccgccggagccaccttgccggaccggaaacagcgaatcggatcgcatcaaagctgcctagtcatcccccccctccccgaccggaactcgctgcaatccgtcgcaggtcgccggggccgtggacgccgggccgccgtcgccaaacggaagacgctgcctcctagccgctgccgcagggaggtaccgtctcggggccgcaactgcaggggcgaattgtcgctcagcaggcggtcagattcatggcgcccacggagacttatgcaagggacgacgatgcaaaacttgaggccacacgtgcaaggctgtcaaacatcctcagaaggcatgaagatctgaaagagcgcctttcacgggattctgataagctgatttttgagcgcctacagaaagaatttgaggctgcacgagctgctcaaaccgaagatggtttggatccttcagttagccagattttatctgtagatcacagaattgtctacacattcttttggcattctgtagagatttcaatagatgatgatgagtggaatgatggtttactggcaaccatccgtgagaaggtccatatggaggctgataggaaggccatggccaaccaagtaaatgttccagcagatcttccatttcaatcaaggactacatataggattagaaataaggtagcatttgctccccagatcattgccttttctaatatagttttgtatatggttagcatgtctgctgagattggtgctgctttggttatctattgcttggatggagcgaggattggcatacagtatgagacattctttgctggcgagccttgtgaaatttttcattgtgttttggaaagcaagtcattcctggaaaagatgattgtgattgaacacaccttgcctttctttctgcccatacgtgaattagaaagtgatctcttgtcatctaattccattaaattcattgatcatcttgaagaaattttacaggcttatattgacaggagagagcagcttctaccatttggccaatcaactgttgaggcatttatagctgtaaagatgggtcaagtgtggaaggttcgtcttatcaaggagctctacgggaaccaaattggcgagctgttccatagtcttccttacaatatgatcgagtttgtattggaggattttgagtggttacaatcagtatccgatattcggatctactgcagaccctgccgagtcaagcaagggtcttggcttggccacttcgctcggccaagagaatatccacaagaagcagcagtgcatcagctgcgcaaccagtaccttttcacctttcatacgccgaggaagcactcaagaccttgtgtctaccagaagcatacgcagacattgtgctggagctacctcatgctctgaagaggattttctcctctcgggacagtgactgaatcctgacctcaaggtctctgtaagattcacatctcaatcttgggaggtgggacaggtgtttgaagatatattgttgagaatcttgtggtagtatagcctgcagttgtggactgcaattcctgtgaaagcaaggcagacacatttgctccgttgaccgctctaaggtccagcccgttgcgaaaaaattttcgagctactgtagcattttcgtttttatgtggcaattattgttcaattatggactaactggactcaaaagattcgtcttgttaattacagataaattgtgtaattagtta

SEQ ID NO: 263 - DNA, 226 bp, Sorghum bicolor
  misc_feature (19)..(19): n is a, c, g, or t
  misc_feature (63)..(63): n is a, c, g, or t
  misc_feature (80)..(80): n is a, c, g, or t
  misc_feature (82)..(82): n is a, c, g, or t
  misc_feature (93)..(93): n is a, c, g, or t
  misc_feature (100)..(100): n is a, c, g, or t
  misc_feature (141)..(141): n is a, c, g, or t
  misc_feature (169)..(169): n is a, c, g, or t
  misc_feature (174)..(174): n is a, c, g, or t
  misc_feature (205)..(205): n is a, c, g, or t
mattyardddakatrarsnrrhdkrsrdsdkrkaaraatdgdsvssvdhrvytwhsvsdddwndgatrkvhmadrkamanvnvadsrttyrrnkvaaasnvymvsmsagaavycdgargytagchcvskskmvhtrsdssnskdhaydrrgstvaavkmgvwkvrkygnghsynmvdwsvsdrycrcrvkgswgharryaavhrnythtrkhsrcvykhttcwsym

SEQ ID NO: 264 - DNA, 996 bp, Vitis vinifera
atgcagcatcatgaaaagcttgaaggaaggccaaatatgacaatgggagaagtgaattttatacaagcggaagatgtgcgattagagactacacgagctagattttcaaatgtgattaaaaggcatgggcagttaattgagcgtctttctagggattctgacaagatgatttttgagcgtctacaaaaggaatttgatgccgctcgagcttctcaaactgaagagattcttttagatggcgaacagtggaatgatgggctattagctacaataagggagcgggttcatatggaggcagacagaaaggcaatgccaggggactcaagcatgctaccggatcctcttttccatggaaaaactacttataaagttgggaataaggtaatttgttgtttggaaggggcaaggattggcatacaatatgagacatcttttgctggagaaccttgtgaactgtaccactgtgtgcttgagagtaaatcatttcttgaaaagatgaccgtcatcgagcatacagtaccgttctttctaccaatacgagaagcagaaaatgatcttctgtcttccaatgcaatgaaatttatagatcatgttggagaacttctgcaagcttatgtggatagacgggaacaggttcgccttattaaggagttatatgggaatcaaattgaagagctttatcatagtcttccctaccacatgattgaatttgcactggatgattctgattgcaagataacagttagtcttagatatgcggatctcctctctgtacttccaacccgaattagagtcctagcctggccaatgcagccaagcaagaaaatcataacaagcacagggacaatcggtagaaaggggaactctgttccagctcgtctgtcttacgcagaggatgccttgcgaacaatgagcttaccagaagcatatgcagagattgtgttgaacctgccacgggttctccagcaaaactttcagcatagaggctcagcttag

SEQ ID NO: 265 - protein, 331 aa, Vitis vinifera
MQHHEKLEGRPNMTMGEVNFIQAEDVRLETTRARFSNVIKRHGQLIERLSRDSDKMIFERLQKEFDAARASQTEEILLDGEQWNDGLLATIRERVHMEADRKAMPGDSSMLPDPLFHGKTTYKVGNKVICCLEGARIGIQYETSFAGEPCELYHCVLESKSFLEKMTVIEHTVPFFLPIREAENDLLSSNAMKFIDHVGELLQAYVDRREQVRLIKELYGNQIEELYHSLPYHMIEFALDDSDCKITVSLRYADLLSVLPTRIRVLAWPMQPSKKIITSTGTIGRKGNSVPARLSYAEDALRTMSLPEAYAEIVLNLPRVLQQNFQHRGSA

SEQ ID NO: 266 - DNA, 1319 bp, Zea mays
ctcactgagcactttcatgctttgtaaaactactattctacttcatatttttgtttttactttagggattctgataagctcatttttgagcgcctacagaaagaatttgaggctgcacgggctgctcaaaccgaagagatatcaataaatgatgatgagtggaatgatggtttactggcaaccatccgtgagaagaccaggttcatatggaggctgataggaaggccatgtccaaccaagtaaatgttccagcagatctttcatttcaatcaaggactacatataggattagaaataaggttatatattgcttggatggagctaggattggcatacagtatgagacattctttgctggagagccttgtgaaatttttcattgtgttttggaaagcaagtcattcctggaaaagatgattatgattgaacacaccttacctttctttctgcctgtacgtgaattagaaagtgatctgttgtcatctaattcaattaaattcattgatcatcttgaagaaattttacaggcttatattgacaggagagagcaggttcgtcttatcaaggagctctacgggaaccaaattggcgagctgttccatagtcttccttataatatgatagagtttgtattggaggattttgagtgcaaggttacaatcagtatccgatattcggatctactgcagaccctgccgagtcaggcaagggtcttggcttggccacttcgctcggccaagaaaatatctacaagaagcagcagtgcatcagctgcgcaaccagtaccctttcacctttcatatgccgaggaagcactcaaaaccttgtgtctaccagaagcatacgcagacattgtgctggagctaccccatgctttgaagaggattttatcctctcgggacagtgactaaatcgtgacctcaagatgtccagttttgttgtgcataagattcacatctcaatcgtggggcatgtttttgaagatattgttcagaatcttgtggtagtatagcctgcagttgtggactgcaattcctgtgaaagcaaggcagacatttgcgtgggccgctcgaaatattccggctacagttcctgttaaaagaatcaaaatcctaggaaggccttatggtcgaggcataatcttgccaactgctgtccttgtccttgatgtgtgctccttttttttctccactctggctatgtttgtttccttttagaattatactagcgcgttacgcgcgcctgcacgcgcgtgttgacaaacctattttatttcaaatatcaagtatctaagaagacatgctaaaatttcaacaata

SEQ ID NO: 267 - protein, 234 aa, Zea mays
MEADRKAMSNQVNVPADLSFQSRTTYRIRNKVIYCLDGARIGIQYETFFAGEPCEIFHCVLESKSFLEKMIMIEHTLPFFLPVRELESDLLSSNSIKFIDHLEEILQAYIDRREQVRLIKELYGNQIGELFHSLPYNMIEFVLEDFECKVTISIRYSDLLQTLPSQARVLAWPLRSAKKISTRSSSASAAQPVPFHLSYAEEALKTLCLPEAYADIVLELPHALKRILSSRDSD

SEQ ID NO: 268 - DNA, 1452 bp, Zea mays
ctcactgagcactttcatgctttgtaaaactactattctacttcatatttttgtttttactttagggattctgataagctcatttttgagcgcctacagaaagaatttgaggctgcacgggctgctcaaaccgaagagatatcaataaatgatgatgagtggaatgatggtttactggcaaccatccgtgagaagaccaggttcatatggaggctgataggaaggccatgtccaaccaagtaaatgttccagcagatctttcatttcaatcaaggactacatataggattagaaataaggttatatattgcttggatggagctaggattggcatacagtatgagacattctttgctggagagccttgtgaaatttttcattgtgttttggaaagcaagtcattcctggaaaagatgattatgattgaacacaccttacctttctttctgcctgtacgtgaattagaaagtgatctgttgtcatctaattcaattaaattcattgatcatcttgaagaaattttacaggcttatattgacaggagagagcaggttcgtcttatcaaggagctctacgggaaccaaattggcgagctgttccatagtcttccttataatatgatagagtttgtattggaggattttgagtggtaaggataatatttaattactgctaatgcttggattgcatcaataagttctgttttgttgctagtacactccctcatagaatatgtacacctagtgcagccttctatttttgttatcttgcagcgtgcatgctgaatatcgcatactgattttaagctgctaatatgcataagtagcttgttgcacattttgtagagattgatctgtttgccacttataagcagcaaggttacaatcagtatccgatattcggatctactgcagaccctgccgagtcaggcaagggtcttggcttggccacttcgctcggccaagaaaatatctacaagaagcagcagtgcatcagctgcgcaaccagtaccctttcacctttcatatgccgaggaagcactcaaaaccttgtgtctaccagaaggtgcttcctgtcaccttggcttacagcatacatggctttgtgctgaattgatctgtttctccctgttctgtgtttcagcatacgcagacattgtgctggagctaccccatgctttgaagaggattttatcctctcgggacagtgactaaatcgtgacctcaagatgtccagttttgttgtgcataagattcacatctcaatcgtggggcatgtttttgaagatattgttcagaatcttgtggtagtatagcctgcagttgtggactgcaattcctgtgaaagcaaggcagacatttgcgtgggccgctcgaaatattccggctacagttcctgttaaaagaatcaaaatcctaggaaggccttatggtcgaggcataatcttgccaa

SEQ ID NO: 269 - protein, 148 aa, Zea mays
MEADRKAMSNQVNVPADLSFQSRTTYRIRNKVIYCLDGARIGIQYETFFAGEPCEIFHCVLESKSFLEKMIMIEHTLPFFLPVRELESDLLSSNSIKFIDHLEEILQAYIDRREQVRLIKELYGNQIGELFHSLPYNMIEFVLEDFEW

SEQ ID NO: 270 - DNA, 1009 bp, Zea mays
ttgcttatctctaggatatgcttcttgccctccaagtcatgtactcctatatattctccctagaggcttaatgcaatacatcccacacattatacacattctctccttcaggttctggtccagtatctgaaattgcaaccctgagtattataaaagaattgatatatgagtcatgacatttttctttttaatgagtgtgccttctatcattggccaatcaattgttgaggcacttgtagctttaaagattggagctaagggtcaaatgtggaatctggagacagatgggtcatacagtctttgatggtacatcgctaattatagtttttatttcatgttcaaggttcgtcttatcaaggagctctacgggaaccaaattggcgagctgttccatagtcttccttataatatgatagagtttgtattggaggattttgagtgcaaggttacaatcagtatccgatattcggatctactgcagaccctgccgagtcaggcaagggtcttggcttggccacttcgctcggccaagaaaatatctacaagaagcagcagtgcatcagctgcgcaaccagtaccctttcacctttcatatgccgaggaagcactcaaaaccttgtgtctaccagaagcatacgcagacattgtgctggagctaccccatgctttgaagaggattttatcctctcgggacagtgactaaatcgtgacctcaagatgtccagttttgttgtgcataagattcacatctcaatcgtggggcatgtttttgaagatattgttcagaatcttgtggtagtatagcctgcagttgtggactgcaattcctgtgaaagcaaggcagacatttgcgtgggccgctcgaaatattccggctacagttcctgttaaaagaatcaaaatcctaggaaggccttatggtcgaggcataatcttgccaactgctgtccttgtccttgatgtgtgctccttttttttctccactctggctatgtttgtttccttttag

SEQ ID NO: 271 - protein, 122 aa, Zea mays
MFKVRLIKELYGNQIGELFHSLPYNMIEFVLEDFECKVTISIRYSDLLQTLPSQARVLAWPLRSAKKISTRSSSASAAQPVPFHLSYAEEALKTLCLPEAYADIVLELPHALKRILSSRDSD

SEQ ID NO: 272 - DNA, 974 bp, Glycine max
gcggccgcttctagctagctagggtttgggtagtgagtgtaataaagttgcaaagtttttggttaggttacgttttgaccttattattatagttcaaagggaaacattaattaaaggggattatgaaggcgaagaaaactcagagggattgaggatcttactgggtgaattgagctgcttagctatggatcccacagttctacccatcaataagtgcttttgtggtagtcttgtggcttccatatctggggagcttcatttgcctttatagtattaaccttcttccctctctgttttcttcgccacccttctcttcttttctctcataataatttaaatttgttatagactctaaactttaaatgttttttttgaagtttttccgtttttctcttttgccatgatcccgttcttgctgtggagtaaccttgtccgaggtatgtgcatgattagatccatacttaatttgtgtgcatcacgaaggtgaggttgaaatgaactttgcttttttgaccttttaggaaagttcttttgttgcagtaatcaattttaattagttttaattgacactattacttttattgtcatctttgttagttttattgttgaattgagtgcatatttcctaggaaattctcttacctaacattttttatacagatctatgctcttggctcttgcccttactcttggccttgtgttggttatttgtctacatatttattgactggtcgatgagacatgtcacaattcttgggcttatttgttggtctaataaaaggagtgcttattgaaagatcaagacggagattcggttttatataaataaactaaagatgacatattagtgtgttgatgtctcttcaggataatttttgtttgaaataatatggtaatgtcttgtctaaatttgtgtacataattcttactgattttttggattgttggatttttataaacaaatctgcggccgc

SEQ ID NO: 273 - DNA, 974 bp, Glycine max
gcggccgcttctagctagctagggtttgggtagtgagtgtaataaagttgcaaagtttttggttaggttacgttttgaccttattattatagttcaaagggaaacattaattaaaggggattatgaagtagaaatggatattgagcaattgaggatcttactgggtgaattgagctgcttagctatggatcccacagttctacccatcaataagtgcttttgtggtagtcttgtggcttccatatctggggagcttcatttgcctttatagtattaaccttctttgctcataatccatttctacacccttctcttcttttctctcataataatttaaatttgttatagactctaaactttaaatgttttttttgaagtttttccgtttttctcttttgccatgatcccgttcttgctgtggagtaaccttgtccgaggtatgtgcatgattagatccatacttaatttgtgtgcatcacgaaggtgaggttgaaatgaactttgcttttttgaccttttaggaaagttcttttgttgcagtaatcaattttaattagttttaattgacactattacttttattgtcatctttgttagttttattgttgaattgagtgcatatttcctaggaaattctcttacctaacattttttatacagatctatgctcttggctcttgcccttactcttggccttgtgttggttatttgtctacatatttattgactggtcgatgagacatgtcacaattcttgggcttatttgttggtctaataaaaggagtgcttattgaaagatcaagacggagattcggttttatataaataaactaaagatgacatattagtgtgttgatgtctcttcaggataatttttgtttgaaataatatggtaatgtcttgtctaaatttgtgtacataattcttactgattttttggattgttggatttttataaacaaatctgcggccgc

SEQ ID NO: 274 - DNA, 974 bp, Glycine max
gcggccgcttctagctagctagggtttgggtagtgagtgtaataaagttgcaaagtttttggttaggttacgttttgaccttattattatagttcaaagggaaacattaattaaaggggattatgaagacgggttaatttagggctggttgaggatcttactgggtgaattgagctgcttagctatggatcccacagttctacccatcaataagtgcttttgtggtagtcttgtggcttccatatctggggagcttcatttgcctttatagtattaaccttctccagcccataattaacccgtcacccttctcttcttttctctcataataatttaaatttgttatagactctaaactttaaatgttttttttgaagtttttccgtttttctcttttgccatgatcccgttcttgctgtggagtaaccttgtccgaggtatgtgcatgattagatccatacttaatttgtgtgcatcacgaaggtgaggttgaaatgaactttgcttttttgaccttttaggaaagttcttttgttgcagtaatcaattttaattagttttaattgacactattacttttattgtcatctttgttagttttattgttgaattgagtgcatatttcctaggaaattctcttacctaacattttttatacagatctatgctcttggctcttgcccttactcttggccttgtgttggttatttgtctacatatttattgactggtcgatgagacatgtcacaattcttgggcttatttgttggtctaataaaaggagtgcttattgaaagatcaagacggagattcggttttatataaataaactaaagatgacatattagtgtgttgatgtctcttcaggataatttttgtttgaaataatatggtaatgtcttgtctaaatttgtgtacataattcttactgattttttggattgttggatttttataaacaaatctgcggccgc

That which is claimed:

1. A method for producing a self-reproducing hybrid plant comprising:
a) obtaining a first plant comprising in its genome a first suppression cassette and a first expression cassette,
i) wherein said first suppression cassette comprises at least one first silencing element wherein said first silencing element, when expressed by said self-reproducing hybrid plant, reduces the level of at least one target sequence, wherein said target sequence comprises a member selected from the group consisting of,
A) a gene critical to meiotic second division reduction,
B) a gene critical to meiotic recombination, and
C) a gene critical to meiotic chromosome segregation,
ii) wherein said first expression cassette comprises a nucleic acid molecule encoding an active centromere-specific mutant polypeptide, wherein said active centromere-specific mutant polypeptide is expressed in said self-reproducing hybrid plant;
b) obtaining a second plant comprising in its genome a second suppression cassette and a second expression cassette,
i) wherein said second suppression cassette comprises at least one second silencing element, wherein said second silencing element, when expressed by said self-reproducing hybrid plant, reduces the level of a wild-type centromere-specific polypeptide or a homolog thereof;
ii) wherein said second expression cassette comprises a nucleic acid molecule encoding a wild-type centromere-specific polypeptide or homolog thereof, wherein said centromere-specific polypeptide is expressed in said self-reproducing hybrid plant; and
c) crossing said first plant with said second plant thereby producing said self-reproducing hybrid plant.

2. The method of claim 1, wherein said first suppression cassette comprises a silencing element with inhibitory activity against a target sequence, wherein said target sequence comprises a member selected from the group consisting of:
a) Osd1 or a homolog thereof;
b) Spo11-1 or a homolog thereof;
c) Rec8 or a homolog thereof;
d) PRD1
e) PRD2
f) PRD3
g) DYAD
h) PAIR1
i) Spo11-2

3. The method of claim 1, wherein said first expression cassette comprises a nucleic acid molecule encoding an active centromere-specific mutant polypeptide, wherein said active centromere-specific mutant polypeptide is selected from the group consisting of: CENH3-tailswap, H3.3, CENPC, MCM21, MIS12, NDC80, NUF2 and a fragment or variant of CENH3, wherein said fragment or variant is an active CENH3 mutant.

4. The method of claim 2, wherein said first expression cassette comprises a nucleic acid molecule encoding an active centromere-specific mutant polypeptide, wherein said active centromere-specific polypeptide is CENH3-tailswap.

5. The method of claim 1, wherein said first expression cassette further comprises a tissue-specific promoter operably linked to said nucleic acid molecule encoding an active centromere-specific mutant polypeptide.

6. The method of claim 4, wherein said tissue-specific promoter is an ovule-specific promoter.

7. The method of claim 6, wherein said ovule-specific promoter is the ovule-specific promoter for the BEL1 gene.

8. The method of claim 1, wherein said second suppression cassette further comprises a first inducible promoter operably linked to said second silencing element, wherein said first inducible promoter drives expression of said second silencing element in said self-reproducing hybrid plant.

9. The method of claim 8, wherein said first inducible promoter is selected from the group consisting of:
a) T7 promoter,
b) 4X UAS promoter, and
c) LexA Operator.

10. The method of claim 8, wherein said first inducible promoter is specifically induced by transactivator A;
wherein said first plant further comprises a third expression cassette comprising a first transactivator promoter operably linked to a nucleic acid molecule encoding transactivator A; and
wherein said transactivator A induces said first inducible promoter and drives expression of said second silencing element in said self-reproducing hybrid plant.

11. The method of claim 10, wherein said transactivator A is selected from the group consisting of:
a) T7 polymerase,
b) Gal4DBD-VP16, and
c) LexA-Activator fusion.

12. The method of claim 10, wherein said first transactivator promoter is an ovule-specific promoter, wherein said ovule-specific promoter drives expression of said transactivator A in the ovule of said self-reproducing hybrid plant.

13. The method of claim 12, wherein said ovule-specific promoter is the ovule-specific promoter for the BEL1 gene.

14. The method of claim 1, wherein said first suppression cassette further comprises a second inducible promoter operably linked to said first silencing element, wherein said second inducible promoter drives expression of said first silencing element in said self-reproducing hybrid plant.

15. The method of claim 12, wherein said second inducible promoter is selected from the group consisting of:
a) T7 promoter,
b) 4X UAS promoter, and
c) LexA Operator.

16. The method of claim 14, wherein said second inducible promoter is specifically induced by transactivator B,
wherein said second plant further comprises a fourth expression cassette comprising a second transactivator promoter operably linked to a nucleic acid molecule encoding transactivator B, and
wherein said transactivator B induces said second inducible promoter and drives expression of said first silencing element in said self-reproducing hybrid plant.

17. The method of claim 16, wherein said transactivator B is selected from the group consisting of:
a) T7 polymerase,
b) Gal4DBD-VP16 and
c) LexA-Activator fusion.

18. The method of claim 1, wherein said wild-type centromere-specific polypeptide is selected from the group consisting of: CENH3, CENPC, MCM21, MIS12, NDC80 and NUF2.

19. The method of claim 18, wherein said wild-type centromere-specific polypeptide is CENH3.

20. The method of claim 18, wherein said second expression cassette further comprises a tissue-specific promoter operably linked to said nucleic acid molecule encoding a wild-type centromere-specific polypeptide.

21. The method of claim 20, wherein said tissue-specific promoter is a central-cell specific promoter.

22. The method of claim 21, wherein said central cell-specific promoter is selected from the group consisting of: AT-DD7 PRO, AT-DD9 PRO, AT-DD22 PRO, AT-DD25 PRO, AT-DD36 PRO, AT-DD41 PRO, AT-DD66 PRO and AT-DD65 PRO.

23. The method claim 1, wherein said first plant is obtained by simultaneously or sequentially introducing into a plant said first suppression cassette and said first expression cassette.

24. The method of claim 1, wherein said first plant is obtained by crossing a plant comprising said first suppression cassette with a plant comprising said first expression cassette.

25. The method of claim 1, wherein said second plant is obtained by simultaneously or sequentially introducing into a plant said second suppression cassette and said second expression cassette.

26. The method of claim 1, wherein said second plant is obtained by crossing a plant comprising said second suppression cassette with a plant comprising said second expression cassette.

27. The method of claim 1, wherein said self-reproducing hybrid plant is a dicot plant.

28. The method of claim 27, wherein said dicot is Brassica, sunflower, cotton, canola, safflower, tobacco, Arabidopsis or alfalfa.

29. The method of claim 1, wherein said self-reproducing hybrid plant is soybean.

30. The method of claim 1, wherein said self-reproducing hybrid plant is a monocot plant.

31. The method of claim 30, wherein said monocot is maize, wheat, rice, barley, sorghum or rye.

32. A self-reproducing hybrid plant produced by the method of claim 1.

33. A seed of the self-reproducing hybrid plant of claim 32.

34. A suppression cassette comprising at least one first silencing element, wherein said at least one first silencing element has inhibitory activity against a target sequence, wherein said target sequence comprises a member selected from the group consisting of:
a) Osd1 or a homolog thereof;
b) Spo11-1 or a homolog thereof; and
c) Rec8 or a homolog thereof.

35. The suppression cassette of claim 34, wherein said suppression cassette comprises at least two first silencing elements wherein said at least two first silencing elements have inhibitory activity against a target sequence, wherein said target sequence comprises a member selected from the group consisting of:
a) Osd1 or a homolog thereof;
b) Spo11-1 or a homolog thereof; and
c) Rec8 or a homolog thereof.

36. The suppression cassette of claim 34, wherein said suppression cassette comprises at least three first silencing elements having inhibitory activity against target sequences:
a) Osd1 or a homolog thereof;
b) Spo11-1 or a homolog thereof; and
c) Rec8 or a homolog thereof.

37. The suppression cassette of claim 34, wherein said suppression cassette further comprises a second promoter operably linked to said at least one, at least two or at least three first silencing elements, wherein said second promoter drives expression in a plant.

38. The suppression cassette of claim 37, wherein said second promoter is an inducible promoter.

39. The suppression cassette of claim 38, wherein said second inducible promoter is specifically induced by transactivator B.

40. The suppression cassette of claim 39, wherein said second inducible promoter is selected from the group consisting of:
a) T7 promoter,
b) 4X UAS promoter and
c) LexA Operator.

41. The suppression cassette of claim 39, wherein said transactivator B is selected from the group consisting of:
a) T7 polymerase,
b) Gal4DBD-VP16 and
c) LexA-Activator fusion.

42. A suppression cassette comprising at least one silencing element, wherein said at least one silencing element has inhibitory activity against a target sequence, wherein said target sequence comprises a wild-type centromere-specific polypeptide, or a homolog thereof.

43. The suppression cassette of claim 42, wherein said wild-type centromere-specific polypeptide is selected from the group consisting of: CENH3, CENPC, MCM21, MIS12, NDC80 and NUF2.

44. The suppression cassette of claim 43, wherein said wild-type centromere-specific polypeptide is CENH3.

45. The suppression cassette of claim 43, wherein said suppression cassette further comprises a promoter operably linked to silencing element, wherein said promoter drives expression in a plant.

46. The suppression cassette of claim 42, wherein said promoter is an inducible promoter.

47. The suppression cassette of claim 46, wherein said inducible promoter is specifically induced by transactivator A.

48. The suppression cassette of claim 42, wherein said inducible promoter is selected from the group consisting of:
a) T7 promoter,
b) 4X UAS promoter and
c) LexA Operator.

49. The suppression cassette of claim 47, wherein said transactivator A is selected from the group consisting of:
a) T7 polymerase,
b) Gal4DBD-VP16 and
c) LexA-Activator fusion.

50. A plant comprising the suppression cassette of claim 34.

51. The plant of claim 50, wherein said plant is a dicot.

52. The plant of claim 51, wherein said dicot is Brassica, sunflower, cotton, canola, safflower, tobacco, Arabidopsis or alfalfa.

53. The plant of claim 52, wherein said dicot is soybean.

54. The plant of claim 50, wherein said plant is a monocot.

55. The plant of claim 54, wherein said monocot is maize, wheat, rice, barley, sorghum or rye.

56. The plant of claim 50, wherein said suppression cassette is stably incorporated into the genome of said plant.

57. An expression cassette comprising, a nucleic acid molecule comprising a nucleotide sequence encoding an active centromere-specific mutant polypeptide.

58. The expression cassette of claim 57, wherein said active centromere-specific mutant polypeptide is selected from the group consisting of: CENH3-tailswap, H3.3, CENPC, MCM21, MIS12, NDC80, NUF2 and a fragment or variant of CENH3, wherein said fragment or variant is an active CENH3 mutant.

59. The expression cassette of claim 58, wherein said active centromere-specific mutant polypeptide is CENH3-tailswap.

60. The expression cassette of claim 57, wherein said expression cassette further comprises a promoter operably linked to said nucleotide sequence, wherein said promoter drives expression in a plant.

61. The expression cassette of claim 60, wherein said promoter is an ovule-specific promoter, wherein said ovule-specific promoter drives expression of said centromere-specific polypeptide in the ovule of said plant.

62. The expression cassette of claim 61, wherein said ovule-specific promoter is the ovule-specific promoter for the BEL1 gene.

63. An expression cassette comprising, a nucleic acid molecule comprising a nucleotide sequence encoding a wild-type centromere-specific polypeptide.

64. The expression cassette of claim 63, wherein said wild-type centromere-specific polypeptide is selected from the group consisting of: CENH3, CENPC, MCM21, MIS12, NDC80 and NUF2.

65. The expression cassette of claim 64, wherein said wild-type centromere-specific polypeptide is CENH3.

66. The expression cassette of claim 65, wherein said expression cassette further comprises a promoter operably linked to said nucleic acid molecule, wherein said promoter drives expression in a plant.

67. The expression cassette of claim 66, wherein said promoter is a central cell-specific promoter, wherein said central cell-specific promoter drives expression of said wild-type centromere-specific polypeptide in the central cell of said plant.

68. The expression cassette of claim 67, wherein said central cell-specific promoter is selected from the group consisting of: AT-DD7 PRO, AT-DD9 PRO, AT-DD22 PRO, AT-DD25 PRO, AT-DD36 PRO, AT-DD41 PRO, AT-DD66 PRO and AT-65 PRO.

69. An expression cassette comprising, a nucleic acid molecule comprising a nucleotide sequence encoding transactivator A operably linked to a first transactivator promoter, wherein said first transactivator promoter drives expression of transactivator A in a plant.

70. The expression cassette of claim 69, wherein said first transactivator promoter is an ovule-specific promoter, wherein said ovule-specific transactivator promoter drives expression of said transactivator A in the ovule of said plant.

71. The expression cassette of claim 70, wherein said ovule-specific promoter is the ovule-specific promoter for the BEL1 gene.

72. The expression cassette of claim 69, wherein said transactivator A is selected from the group consisting of:
a) T7 polymerase,
b) Gal4DBD-VP16 and
c) LexA-Activator fusion.

73. An expression cassette comprising, a nucleic acid molecule comprising a nucleotide sequence encoding transactivator B operably linked to a transactivator promoter, wherein said transactivator promoter drives expression of said transactivator B in a plant.

74. The expression cassette of claim 73, wherein said transactivator promoter is selected from the group consisting of: UBI PRO, AT-EF1A PRO, GM-EF1A PRO and AT-UBIQ10 PRO.

75. The expression cassette of claim 73, wherein said transactivator B is selected from the group consisting of:
a) T7 polymerase,
b) Gal4DBD-VP16 and
c) LexA-Activator fusion.

76. A plant comprising the expression cassette of claim 57.

77. The plant of claims 76, wherein said plant is a dicot.

78. The plant of claim 77, wherein said dicot is Brassica, sunflower, cotton, canola, safflower, tobacco, Arabidopsis or alfalfa.

79. The plant of claim 78, wherein said dicot is soybean.

80. The plant of claim 76, wherein said expression cassette is stably incorporated into the genome of said plant.

81. A plant comprising stably incorporated in its genome at least one nucleic acid molecule construct selected from the group consisting of:
a) a first suppression cassette comprising at least one first silencing element having inhibitory activity against a target sequence, wherein said target sequence comprises a member selected from the group consisting of:
i) Osd1 or a homolog thereof;
ii) Spo11-1 or a homolog thereof; and
iii) Rec8 or a homolog thereof;
wherein said first silencing element is operably linked to a first inducible promoter,
wherein said first inducible promoter is induced by transactivator B;
b) a second suppression cassette comprising at least one second silencing element having inhibitory activity against a wild-type centromere-specific polypeptide, or a homolog thereof, wherein said second silencing element is operably linked to a second inducible promoter, wherein said second inducible promoter is induced by transactivator A;
c) a first expression cassette, wherein said first expression cassette comprises a first nucleic acid molecule encoding an active centromere-specific mutant polypeptide, wherein said active centromere-specific mutant polypeptide is selected from the group consisting of: CENH3-tailswap, H3.3, CENPC, MCM21, MIS12, NDC80, NUF2, and a fragment or variant of CENH3, wherein said fragment or variant is an active CENH3 mutant,
wherein said first nucleic acid molecule is operably linked to a first ovule-specific promoter, wherein activation of the first ovule-specific promoter expresses said active centromere-specific mutant polypeptide in the ovule of said plant;
d) a second expression cassette, wherein said second expression cassette comprises a second nucleic acid molecule encoding a wild-type centromere-specific polypeptide, wherein said second nucleic acid molecule is operably linked to a central-cell promoter, wherein said central cell-specific promoter expresses said wild-type centromere-specific polypeptide in the central cell of said plant;
e) a third expression cassette, wherein said third expression cassette comprises a third nucleic acid molecule encoding transactivator A, wherein said third nucleic acid molecule is operably linked to a second ovule-specific promoter, wherein said transactivator A is expressed in the ovule of said plant;
f) a fourth expression cassette, wherein said fourth expression cassette comprises a fourth nucleic acid molecule encoding transactivator B,
wherein said fourth nucleic acid molecule is operably linked to a constitutive promoter, wherein said transactivator B is expressed in said plant.

82. The plant of claim 81, wherein said plant comprises at least two nucleic acid molecule constructs comprising:
a) a first suppression cassette comprising at least one first silencing element having inhibitory activity against a target sequence, wherein said target sequence comprises a member selected from the group consisting of:
i) Osd1 or a homolog thereof;
ii) Spo11-1 or a homolog thereof; and
iii) Rec8 or a homolog thereof;
wherein said first silencing element is operably linked to a first inducible promoter, wherein said first inducible promoter is induced by transactivator B;
b) a first expression cassette, wherein said first expression cassette comprises a first nucleic acid molecule encoding an active centromere-specific mutant polypeptide, wherein said active centromere-specific mutant polypeptide is selected from the group consisting of: CENH3-tailswap, H3.3, CENPC, MCM21, MIS12, NDC80 NUF2 and a fragment or variant of CENH3, wherein said fragment or variant is an active CENH3 mutant,
wherein said first nucleic acid molecule is operably linked to a first ovule-specific promoter, wherein activation of the first ovule-specific promoter expresses said active centromere-specific mutant polypeptide in the ovule of said plant; or
c) a third expression cassette, wherein said third expression cassette comprises a third nucleic acid molecule encoding transactivator A, wherein said third nucleic acid molecule is operably linked to a second ovule-specific promoter, wherein said transactivator A is expressed in the ovule of said plant.

83. The plant of claim 82, wherein said plant comprises:
a) a first suppression cassette comprising at least one first silencing element having inhibitory activity against a target sequence, wherein said target sequence comprises a member selected from the group consisting of:
i) Osd1 or a homolog thereof;
ii) Spo11-1 or a homolog thereof; and
iii) Rec8 or a homolog thereof;
wherein said first silencing element is operably linked to a first inducible promoter, wherein said first inducible promoter is induced by transactivator B;
b) a first expression cassette, wherein said first expression cassette comprises a first nucleic acid molecule encoding an active centromere-specific mutant polypeptide, wherein said active centromere-specific mutant polypeptide is selected from the group consisting of: CENH3-tailswap, H3.3, CENPC, MCM21, MIS12, NDC80 NUF2, and a fragment or variant of CENH3, wherein said fragment or variant is an active CENH3 mutant,
wherein said first nucleic acid molecule is operably linked to a first ovule-specific promoter, wherein activation of the first ovule-specific promoter expresses said active centromere-specific mutant polypeptide in the ovule of said plant; and
c) a third expression cassette, wherein said third expression cassette comprises a third nucleic acid molecule encoding transactivator A, wherein said third nucleic acid molecule is operably linked to a second ovule-specific promoter, wherein said transactivator A is expressed in the ovule of said plant.

84. The plant of claim 81, wherein said plant comprises at least two nucleic acid molecule constructs comprising:
a) a second suppression cassette comprising at least one second silencing element having inhibitory activity against a wild-type centromere-specific polypeptide, or homolog thereof, wherein said second silencing element is operably linked to a second inducible promoter, wherein said second inducible promoter is induced by transactivator A;
b) a second expression cassette, wherein said second expression cassette comprises a second nucleic acid molecule encoding a wild-type centromere-specific polypeptide, wherein said second nucleic acid molecule is operably linked to a central-cell promoter, wherein said central cell-specific promoter expresses said wild-type centromere-specific polypeptide in the central cell of said plant and
c) a fourth expression cassette, wherein said fourth expression cassette comprises a fourth nucleic acid molecule encoding transactivator B, wherein said fourth nucleic acid molecule is operably linked to a constitutive promoter, wherein said transactivator B is expressed in said plant.

85. The plant of claim 84, wherein said plant comprises:
a) a second suppression cassette comprising at least one second silencing element having inhibitory activity against a wild-type centromere-specific polypeptide, or a homolog thereof, wherein said second silencing element is operably linked to a second inducible promoter, wherein said second inducible promoter is induced by transactivator A;
b) a second expression cassette, wherein said second expression cassette comprises a second nucleic acid molecule encoding a wild-type centromere-specific polypeptide, wherein said second nucleic acid molecule is operably linked to a central-cell promoter, wherein said central cell-specific promoter expresses said wild-type centromere-specific polypeptide in the central cell of said plant; and
c) a fourth expression cassette, wherein said fourth expression cassette comprises a fourth nucleic acid molecule encoding transactivator B, wherein said fourth nucleic acid molecule is operably linked to a constitutive promoter, wherein said transactivator B is expressed in said plant.

86. The plant of claim 77, wherein said wild-type centromere-specific polypeptide is selected from the group consisting of: CENH3, CENPC, MCM21, MIS12, NDC80, N U F2.

87. The plant of claim 86, wherein said wild-type centromere-specific polypeptide is CENH3.

88. The plant of claim 81, wherein said plant is a dicot or a monocot.

89. The plant of claim 88, wherein said dicot is Brassica, sunflower, cotton, canola, safflower, tobacco, Arabidopsis or alfalfa.

90. The plant of claim 89, wherein said dicot is soybean.

91. The plant of claim 88, wherein said monocot is maize, wheat, rice, barley, sorghum or rye.
